United States Patent Application Publication US 2008/0039413 A1 - sequence listing, part 7

SEQ ID NO: 874 - DNA, 451327 bp, Homo sapiens
aatgttctgagtgtggtagacaatataacagaaattgaagacagggactttgtccttgagaaattgatccatccagctagggagatgaaaattaccttaataaagtacagttatcaaacacttctggtgtgccaggtgctgtgctcagagctttgaagaccttatttcactgaatcctcagaaacctggggaagtaagcactactgcgatctgtgtgttatacaggagtaaaccaaggtttgggatgtttacaaactcttcaaagggttgttgtgaggattatgtgagaaaccataatgcattatatcagttgggtttacatgtgattttctacaaaaaaaaaaaaaaaaagaaagaaaaagggggaaaaaagaccaaaacaaagcaaaaaataccagaagcttaaacaagacagaagtttattcttatttctcatacacgaagtcaggaggtagacagcagctgagctgccctgagcagctccgcttgagcgtgtggacgtactgacttccaagggaatatgcaaaatgtcgatttttttaaacaggtggtcatgtgcccagctaaacactggggcttctgtaactaaaggtgggaagaacagatattgggttagttaggcaacttgcttctctgccgtatgtatgcaaagtgccagacacgggataaacatactaagtggtatgtaataacagttacaaagctcaatgcagcctagaggtggtttggttcattgattaaatacaactctttgtgtctgaggttttctcttttttacgcttgtgcactatccctaaacaggtaagtgaatgagaacaagggagggtgtaccgcaggccgggggcatccccatccccgcttgggccagcttctcctttaccttttccagagattcgaggtggtttgccctaaggtttcacacctgtgtgaaggtggcaggaagcagccaagtcatgatgcaaagcaaggacgctgcccaggcctgggcatttcagcttctgcttgcctctcctgctccctctcagcacctgtgaatgacagctcaggtctctggcaaatgggaaaaacccaggacatgccagtcacattggacaagacatcctctgtatcagtgacaacaagcaagacgcccctcatgctgtgcaagcaggtggccctgagaaagggttggttgtaactcatggttaggtgtcttgaatttggtccatttattttgaaaggttttccatggatcatctcaatctcacaaattcctagataacagagaagatgctcaggctacagaatgttcccactgtgtggagttgaggagttgtcctccgcctcttaaaccttgaagcttgctttttcttttgagacaagttctcactctgaggcccaggctggagtgcagtggtctgatcacagctcactgcagcctcgacttcctaggctcaggtgattctcccagctcagcctcccaagtagctaggactacaggcacatgtgactgtacctagctaatttttttttttttttatagagatgagatttcaccatgttggccaggctggtctcgaactcctgggctcaagctattcgcctgccttggcctcccaaagttctgggattataggcatgagccaccatgcccagcctgaagctttctttagagctaagtttctatggtgagcagggttggcttatcagagcagggctgggagagcaagctgggtaggactgatgggtagtgtggaatggtctggacggcagggataaaagctggaatctccagttgcttcatgccaatatggtttgggcaggaaagggtggagaggaaaaagaggaaagagaaggcctcggccctgccatcctctcacctccttatctaatctacgacctcattcttcagtgttacctcctcactgtctctctcatggaggccactgctagcatacatggagctttgtgtaagttagaaaaagacaccccattctccagtggactcagctctgtgccaggactcaatgagtagcatgcaaggccctggctgaatcagagcccccacccacctccttggccttgagcagtgagcaatctgcacattctgaagtagtggactctgtggggtcagttcacttatctctatccccatagtccctctggtccccatacaactccaccatctctcttttctcacttgggctatgcgcaatcatcacagataattaggagagccatttataaagaggcctacatttagacgcggtgttgttgccaggtacagttatacatttagtcctagagataacaacaactagattaaaagatgttcttcatgttttttgctttttaggttgggatctatgatcagctcacactgccctatgaattaaaaaataaataaatcttaagatttattctgcaaaaggcatatttgtatagcattgtattcttgagtctgtacattaggaatttaaaaatgtaaacattaaaataaacatttgtatgctcctcttttatggttttaaaaaatatcataatatcctcagagccgcaataaatgagagtggccaggccgccctggtcccagaggtttgagccccgactcccgggacctgccgcccgattccagctctggccgcactgccaacatgctgtcttcctagcagtggtttcttgctataacccagatctgatgtcagccccctgcttcaatgccctggttacttcccactgcttttgggtcacaagccctgatttaattgggcctgggacaagcatggtggtccctgtctcccagcatgcctgccctcaccctgctctccagtcccacttgcctcctgccgtctgcggcactctttcccttctttatttaatgttttctcctctttctttagtgttcagcccaagtcacatttcctcagggaagctgtccctcagcccccagtctgcatcaggctccttggctatttccctcatagaaccctgtacctttccttcagaacccattgctttgtaactctccattagtgatcattcaatgaatgatccggtacattcaatgtggtcaagtgttattagtttttgttgttcactccagtgcccacagcacctagcacagggctagggcagagtaggtgatagacagttccttgtcaaatgaataattggggttgaggcaaggagtccccttcccagatgctccttgtgggttatgctttggcagggaaaccttttggcatgtccggtccttgagaaagagggtcacctatactacacagagtacagcttgacacaggtgtcacctgagggcccaagaagatgccagggagagctcactgaaatttaagtcttagagttacatgttgcaatgtaacttcaagttagagagagaaaaaaattctttatatttaacttgggcatttttaggggaatgggttaataagcagattcctcaatgaaattatgtcattttggtatgaaaagcatataaccaagtcctttggccctgaccaagacaattagatgactgtcataaacccttaaaggtgctcactgactcgcataatgaattagaaaccaagtcatcaggtataagcaaggtgaactaaaaacgaggaatgcgctccattaatgcacgagttattgttatttgggacttactgtttttgaaacatagtcttattctcaaagtttacctgtactataaagcaattaatcattatctgtgagagacctagaaggccttcaggtaagttcctgaaacttttctagaaaactgaggtgattcaactgccaagtgacttatttgtatacctgattatatatgcttactacccaaatatttattttgaggaactagagtggagttacctatgcaggacctttagccagccaggcagcatgttatcactaagaacggccacaaagatgactacatgatgtgatgtagaatactgaaaaacactggtaggtgctcagtaagtgattttcactaatggcaaaatgattgaggacagtactggaaataaaagcagccattgaacacacatttgtctaaaagttacaagaaatttataaatgaggctgtgataaagtcattcaaaagcggacagtccaggataaaataaaaagtacaatgtattaaaatgtagtaaggtgtttcttaatgtatttcactggtgttactatgtttctaaggaatttggagagaaactgtagtagcctgatgttaaacttaaggttctggaagtccagactccacagtggtgggttccaggtgtcaagtcggagttgtgtcagcgggaggattagggtcagctgcccgctaatggcagccagcaagcctccgctgcaggaaatgctgcgggatggggaaggtctgagcttgcttctttactggccaaatcccatgtgacattgaggggcagaccttagtaggtatgagtgattgttaattgtttatctcccctatgaaggacaggaccaaggtaattatctttcattttcaaggcatggcacaaggtagactctaggtaaatttgttgaatgactacatgcagtgtatctccatccaggtttattatccccacaataattttcttagtaagtttattagtgctaccgtctgccatagttcccaaatttgaactattttttttgcctaggcttctttttttttttcaaatcctacctaattgatttgcacagttgtttcaaatcaaatgctacatcccatatcttgcagtgacgcagttattcactgctaacgtctaaatcggagaagtgaaaaggacaattgtttcgtgctttcttaagtccctgaccaagatcagtagggaaatcccattagctctattcatcgcatttctcataaatctaaaaggaaagcaagtatccaaagctttattctttaatagttcttatttgtaaaaccttgacagggctttattctaaattgcttccaaattacataaagaatagttagaaatatgatgggcagtgaatcgtgatagtttcagtcatcgaataaataagtagaacagtaaaaggggactaatctgaaagcaaacagagtatgatgggctacgatgaggcaaaaagaacagaactgtggaattcttaaactaccatctggctcaatcccctttaagtggccaagttgaagagccttttattcagtgccctaaaacttattcaaaaggcgcagtatttgaatattaatatttccatacagtaaaaaaaaaagtcttttgtaaccaaaaaggaatgtttaacaaaataatgggtaatcctctggctaaacatgagggcgtggggagcaccctgtgggtgggaggtcggctggaacccagggtggctgcgggcagcctccgggccttcccctcatggcttctttgtggttagggtaacttattaaagttgtcattgtggtttgaaatttaggcaagaggtgtaaaattaaggaattcattaggaaaaatgagcgcagtgatttctagtaccttatttcatcaaaaagaaacaataaggtagaattgccatatgagatagttgaggcaaggaacacaatggaaatttgaacctgtggttgaaattgtgcttttgtgtaatgggaacctatttcatcactttgtaacagacccctgacaattggtgttttgtttgttaagccctggatgtttaaatgaaactaaacaggcttttattttgttttcctgaggtgtgtatgaaaagttgagcaaattcgagtgcacttcttatcttcagcaaagatgctttagaaaggtattttagcattctccgtggtttaaaagacaaaaccaagtcctgccggctttgtgttgtgcttctcctacaggctgcagtgccttctgtctgctttagggtgtggcatctgccattggggaggaaaaactggcatgtgtcgccttttatagcagactgatttcattgtgctgggggcctctattttatagtctcttagttccaatcttctagttgacttgctgaagcaaatggaattaaaagagattttgacttctctactaatttttttttagtttcacgatttgccaatatgaaaaaatattttaaggaaaagggccatagctgaacttggtgactcattttcccttttaggattagttgtgaaaataagccacaacatatggctacacttgtatgaactgactttgatatattttatcaatttgaaaaaatgcacttttaggatgatgtgtacatacttagtttgactatgtctaaaagcataaatatgtaattgattttagaatatatgtatatacacacaaaacagacatatatttatatttgcatatgaaaaactaaaaattcaacttctgtggtgtaatgcgtataattagtatgtatttgaatatataaagggagaaaatccaggaaaaaatgtcaaaaaggcacactaacaaagatgtagtattctcttggcaaaaactgatgaatgatttggcacgaattcatcttatggttctgttattctctctaacacacgatgatatatcccgttttccagttgtttgcgtagaattgcaatttgttgtttctacactctataatgacccttgggtgtgcacctgattccctccccccgaccccaattagtcaccagttttcccatcaatccttttctatttagtcatgtaacatatttacacttggtcaaacaaataaccactgctgcagtggaaatgaactaaaatagtttttatggaaagctgaagaatgaaataattttggaaaactatactctaccaaaaccgtaagtattgtttctgccaggttttaaatgctttctctcaatgaaaactgagtccacactagtacaagtgggtcattgcctaaggttaagaagtcttgctttttaaaatgttactaggggacaatgcacatattgaaaacattaataacaatgcaaatattaaaaacattataaaatgttaatagacaccaatttttaagagaacaaagtatggaacatttctacattaggactagagttgactgttttatattattattgaagttatatttattaaatataatgtctataatattttagtttcgttccacatctctttgaaatgaatgtatatcgagagggttaactgtgcacacgaagctctgaaacatgatgaaaggtgtcatatagatttatgaagatacgagctaacccatagctgtcgctgttctggcaccaagagttaaatgttcatgtgaaagttggcgcagaaaacaccactgtacatactccacagaggacatccaagtgcatgtaagaaaaatgctcctttgggaatacgtggacatattcctttggaaatacactgacaaacctacatacgtgtttaaggtgccttcaaaaagagttatgtaaacattctctttggggcgggtgcagtcagtcataagcatttattgagtacctactgggtacaggccatagggctctctgaccggggctaaccttcatttcaaatctttcctaattttgcagttggaagaagttgtgggaattacgccgatggcccgaaatcaaggcagaggcgaacgttctgaaaattacataactcctgggagagaccgtgcttttgcagattgcctaaatattttctttctccgtcggctccttgtaacctctgaggccaatagacaactttgtttcccagcccttctccctcttttgtctgctcgtcagactcgttttccacctttgtatcgttccttttagacgtgaaaacaaacatgcgaacgcccggttggcaaggagacagcggcccggggggaaagtgcaggttccggccgccccacgccgccgcgctccgagcggccgccgagccgccccggccccggccccggccccagccttagcccaagcccggctgggtcccgcgaggctgcgccggggcgggcggcggcggcccggggacgagtccagtccgcgttttgcgagtgcgcgggagtaatgcgagcgaagtggataatagttgctcgagctcgcccgctgcctctcaagccatgctgggcccgataggctcagctagtcgtgtatttacccatatccgggctagagaggaaaagagaaaagtttcatttaaacctgaactaaaaactttcaccatgaaagcacacagcaggagcaggcccagagcgtaaggcgtgcccggcccggcgctccggcggggcctgcggagggggagggggtcgcggcttcccggcgggccgcgtggatgcgcacaggaggggccgcggcctgaaaagtgggggttattgtctccccccgccccccgcccggcctcgccacgccgcggcgatcatggccgcgcgggcagcagcggcggcggcggcggcggcggcgcgggcgcgggcgcgggcaggcagcggcgaacggcgggcgccccccgggccgcggccggcgcccggagcccgggacctggaggcgggggcgcgcggcgcggcggcggcggcggcggcaccgggacccatgctggggggcggcggcgacggcggcggcggcctgaacagtgtgcaccaccaccccctgctcccccgtcacgaactcaacatggcccataacgcgggcgccgcggccgccgccggcacccacagcgccaagagcggcggctccgaggcggctctcaaggagggtggaagcgccgccgcgctgtcctcctcctcctcctcctccgcggcggcagcggcggcatcctcttcctcctcgtcgggcccgggctcggccatggagacggggctgctccccaaccacaaactgaaaaccgttggcgaagcccccgccgcgccgccccaccagcagcaccaccaccaccaccatgcccaccaccaccaccaccatgcccaccacctccaccaccaccacgcactacagcagcagctaaaccagttccagcagcagcagcagcagcagcaacagcagcagcagcagcagcagcaacagcaacatcccatttccaacaacaacagcttgggcggcgcgggcggcggcgcgcctcagcccggccccgacatggagcagccgcaacatggaggcgccaaggacagtgctgcgggcggccaggccgaccccccgggcccgccgctgctgagcaagccgggcgacgaggacgacgcgccgcccaagatgggggagccggcgggcggccgctacgagcacccgggcttgggcgccctgggcacgcagcagccgccggtcgccgtgcccgggggcggcggcggcccggcggccgtcccggagtttaataattactatggcagcgctgcccctgcgagcggcggccccggcggccgcgctgggccttgctttgatcaacatggcggacaacaaagccccgggatggggatgatgcactccgcctccgccgccgccgccggggcccccggcagcatggaccccctgcagaactcccacgaagggtaccccaacagccagtgcaaccattatccgggctacagccggcccggcgcgggcggcggcggcggcggcggcggcggaggaggaggaggcagcggaggaggaggaggaggaggaggagcaggagcaggaggagcaggagcgggagctgtggcggcggcggccgcggcggcggcggcagcagcaggaggcggcggcggcggcggctatgggggctcgtccgcggggtacggggtgctgagctccccccggcagcagggcggcggcatgatgatgggccccgggggcggcggggccgcgagcctcagcaaggcggccgccggctcggcggcggggggcttccagcgcttcgccggccagaaccagcacccgtcgggggccaccccgaccctcaatcagctgctcacctcgcccagccccatgatgcggagctacggcggcagctaccccgagtacagcagccccagcgcgccgccgccgccgccgtcgcagccccagtcccaggcggcggcggcgggggcggcggcgggcggccagcaggcggccgcgggcatgggcttgggcaaggacatgggcgcccagtacgccgctgccagcccggcctgggcggccgcgcaacaaaggagtcacccggcgatgagccccggcacccccggaccgaccatgggcagatcccaggtaaccctcgcgccagccgggcctgcttccgcccggcggcctcgccgcgccgcgagcctgagtttctttctttgccgcgtacttttccccgtcttcccgcgggggcggcgggggcgcggcgcccaaagccatcttgacgggcggccgcctcccgccgcggtcggggcgccccgggggccggcgcgctgtccaggcctgggagggcttcgccgggccgggccgggccgggtggcttctaccccgccggcccgcacccgcgtcccccccctcccccaggcccgggaacgcgaagcgagatcccgaggcgccacccgcgcggtcgccgtttggggcggcggggaccgttcgggtgcttttgtaacaaataggctctcccggccaggacggctggggcgaagagccacccgatcggttctgggagcgcccacaatgtgctttaacgggggaaagaatgaggaactttctcccacctttagccacagcacgttccctcttggcttccgaggtccaggcagggaaaataggttagctttgtgacaagcgagtgggtttttcctacttagggagagccattcagagacactcggtgcgggcttcgagctcgaacgtttgctggtaggaataataacaaaatttacaacgacatggaggtgcaatattgtaaaatacatcgattcgttccttagaatagccagggaaatccattattgggcttacgggctgcttgcagggagtcaccttcaacaggcaggctatgtgaaaggagcacgttccggatcaattgaacttattttgatcatggattaggcatgcattttattcagcaaatccagtaagatagcagaccagtgaaaattgatcttttgggatcgtatttatttggattttctttattttgctgtcacccgagtcctacagcgctgttaggaagtgtcctgcactcttgctgtttcttgctagtaggctgagcctaaagactgacttgatctcctttgcaaggtttggaatttgaattgtggaggtaaactggctgtaatagtctccagacagctgcctctgagttgacatctaatctgccatctgattggctcccctctcaccattgggcatttagcactgctgatgtaaatagaagtgctgagcagtacagtcacaaaaattcttgccacaaataataactgagctctattacaagcaaatgtaaggttcagtatttaaagctgaaactattatgaatcatagttattaataagaggatcaaatacagaaaaacagttcgctggtgtccagtattgggcatttacaaaattcagatctttgatgatagtcttagaatatgcacattacatatatcatagactttaattggaggctgaggataaggccattgaaaaataagtaaaccacgaattttaccaatttttggatttgtaaagcctttataaaagtcttccctttacaaattcaactatggaaaaatttgaattctgtcagcacacgcagcttaataaaaccttaaaatttttttaagattttgataggcagcaatatattttggtgatgtgtaattcacctgataaacaagatttaagcttcatttttttgtgatttatcagttctgactgttcaaagatatttgtggatgaggagttttggttagaattgacatatttaaaaaacgaaatgaggaaaccacatatttgtgcagataacaataattaaaaggggaaaaatgagatattcctgtgaaatactaagaatcatttcatatttgcttttgatgtggagaatacagaaatgccccataatcttttttttttcttcattgttttgttagattaggtaatttgagccttgtttgaactgcttacacgatgaattagggaaactatattctaagcaagttgtgctgggtgtctttttttccaaataatttttctttcatgttaatgctatgaaagtttaaaaaatcctaatctgttagagaggaacaacagtcgttgtatgtatatttttatgtaactcatttattttaggaagaggtattttaacaataatcataccttagagacttgtcagagtgaaggaagggctgaatttaacaaataatcttgtgaatcctaggctgaacactgctgtccactgctttcagatctttagttattggagttttgcttttaaggataatagatttttctattcttaatagaaaacttgtgatttcaacttgtttttgattcacacgaggaaaaacattatagagaagaatcatggaaataaacccacgtaattaattttaaaaaggtttgctttgtcagcctgcttttaaaggagcagtttaaaattcacatcttcgtaaactagagacgaatgaagttagaggcagatgtaggaccatgttactttagagtatttttttcttaatggtaccaatcattttcagtattttgttttcttgtaatgagaatgaatccattatgtccctatgacccttgggaataggctttttttttttttttttttttttttttttgttgaggttgggggaaatatggacatgcgacctagattcaggaatttcttttaagtaccttaccgtgtaacatgtggaatgtgtcttttttacaatccttttttttcttttctttttggaagttagtattatttagtattagttgttgtaattatactaagaaacagtcatttgtccaaaatattaaattactgcctgactgtaggtcatgaaatgctattaaatcacattgttaaatgatgaaatattttggcttttaatatgtttttagtttcatttttgatttcaggaaatagtttctattgggtggcaaatgttttcgtaattgggacaaaacgtgtatatattataggagaagggtctttttaaaaagtgaaataagccatttgacgattcagtttattactagatttttgtaagatgagtattcagatggagcagtctcaaaaggaatattgaggtctactcacgcacataggttttatgatgtccacatttctactgaattccataaatgcagttttaacttttagttttataaaacgtagtacaatgtattaagaaaagggccttatttaccattagaagaaaagtgattagctagcatgcgaagcaggaagctacaaactggttcctgattaccttaaaatgtgtgtgagatacattatttgataaaatcactcccagttaaattttagggtgtctgatattttaaatcttgtaaacaaatttttgtggcctaaatttatatatttgccaaagtatggatggctgtgtatagttagaaaaggtggacttagtaactgtggctaatggaaagggcctatcatttaaaaaacaggaaaagaaaatataacaaatgtctgcagttttgttttctgaatcatctgggatgaaattatgcatggcttaaaatcgttttcattgggagtcctgatttttgtggtacatacttttgacaatattttggtagttttttttttttagtggtagccactctttaagacagctatcacttaggtttatgtttatattaatactacatcagtaagtatatgctagggactagcacatccttaccttgaatctataatgaggaaccttaacccctctttgctttggctctgcttgtctatatttagtcatgaatttttggcaaggctttttatacttgttccatttttctcaatgtcatagtgtatcagaagtgtgttatggatgtggaaataatgcagatcacacttggacacttttactaatatacttaacctctgaatgtcattttcctttactgaaattgaagaaaataacgtctttattctgatatttaaaaaaaaaaaacattaattctgatttgagaactgattttaaaaatgtaagacaatgtagaggaagacttaatataagctcatttgatcgttttattagacacagataccttttaaagagaataggtgtaatagaatgcggttgagttttcagttctattttttattaatagactttatttctttatgattctgggcagggtgtatctatctaaaaagatgacttctgatgtaataggaacacttgctttcctaggataaattccaatatcacaggcaaaccgaaaagatgatcatttcatttatttaaccctaccctttcctaggagatgagtgatttgatgaacatttgttagggttccatgaaattttctactccgtttggagactcactggggatgtaaattttggatgtgctggcctaggactctgtattcgcttttttgccggtgtcctcaatctggaggcttttcttgcagctctacactggactgacactgctcagctcatggggttgtgtgctttgatccatgtgggtggaaaagggactgatatttcactcgtgtcacttttgttttggagtgtatgtgtagatttgtaaatttgagattgatatttatgtttgatagaagtgtggtgtgttgcataaaatgacagatttatggaggctgaaaatattaataaaacttaattccattttttttttgcaatatttaggttttccagttggatgttataaaatttttatgacattttacactgctgttattactcaaggggccgtatccacctcttaggcctttttgggattgggtggttttggttgcatgccttttcggaggtgccctttcctgaatgggagggaggtttttgcaggttctctgtggatatgtaaagtagtgccgcacgcttgctgtgtgtgcttgcttgaggctgaggaatcccaaaccctgttccctgtcgtgtccgggagaggcaccaggcaaaactgttcctctaccaagaatatatttctgtatcatagatgtagaactattataaatatcttttctctagcttggaggctatttgaatgagactcaatggcccttttggtttaattgggtaattgagtgaattaattctgatctaaaaacttggtgtactttagcaactttttcttcaggaaatttggtaaagataaaatgacttaggtatcagtcattacctgagtgtcctaagtattcatttgtttttccttatactgacatctgaatgaatggaatgatagacatatactatatagttttaattagcaattcactttgagtgagtgaattttttcagagtagaatatgtgtttccactgtaagttttcactaaatatgttctattttcaaaatctttgacttggagtaattctaagaaaattctttccttacatttagttatttgtttttctttttgagacagggtctcactttgccacccaggttggagtgcagtggcgcgatcttggctcactgtggccttgacctcccagattcaagtgattctcctgcctcagccccgcaagcagctgggactacaggtgcacgccatcacacctggctaatttttgtatttttcgtagagatggggtttcgccatgttgcccaggctggtctcgaactcctgacctcaagtgatccaccctcctcggcctcccaaagtgctgggattacagatgtgaaccatcctgccaggcaagatttacttacttaaataggatccagtaggcagttttcaaacccacatctgtatggatcaatgccaagaatattagaaggctactgagtttgacagatgaactaatgatgaaattaacttgtttcttggatgagatttattaccaggcaccagactaaagccctaaaatcttaagcctatctggtttatgaatagctactcttatttccattattaaaatcaggtagatggcagcagaatctggaggagattcaccctctgttgaccatcttctgtaaggtgcacttctcagtgtcttcctgggccttgatgaatgatgagctggagaactagaccagaagccattccttatcaggtgactctggaagggaagccatatttgatgaaatccagaagaaatcctggaccataatgctacattttttctttttttgtaatgggatgctaaaaaattaaatatatggttttttttttaaatagaggtaagctatacgtacataacatacaacttaccatttgaaccatttttaggcatacattccagtggcattaagtacattgtcattgttgtgtggctgtcaccatcatcatctatccccagaacttttccttctcaaactgaaataaaaatatttttctctttcttttaaaattgttagctgctaatgtgtattgtaagtaaaataatcttgtttttgtaaccattaatcttatcacttcatagtttgtgagtaaattcttccgcagacattccatcaggatgctaatggtttttttgtttgtttgtttttgttttttattagtacattacttcctctcaattctaactttggggtaatcctcatagagtttgaggatctctttggagatgtgtattacaaaggttagtagtttcactgccagttatgttattaaaattttgaaaagcagctttttggaacctttctaaagtttaaaggttgagggtatttgttgagagaaacctgggacttggttagataatagggtgtggaaatgaactgttaccattctcacttttcccttgcttttcttccctcaccttttgcatttgtagtctcttaaaaattattaattttattttcccactattagtgaaaatcatttatagtgatatttttttctattctttctgtgtttgaagtttctgggcatctcacccctaccaacccagagcaaacccagagtctaggtggtgccatgtccttttccatagtgttctctgccaccaaatttgtgcctccccctcatgtttttactttttagtcctctgcaaaacttcagaaattctttgtatgtggaaaaattactaaattaagatgattgaccttttagaattacattttaaaggcagctgtgaagggagacttctagatcctgcctagtctcatgaacaggcgtctttggtttgtgtaaggtattggaattgtactggaattgctgctgatgctgataggtagtcacatctttgtaagatcagttatgtactttaacaccagcttccacagagaggaaatgaactgttacttaagagcttgtactgggaagcaatagttatttctttaaggtgtaaacatttagcatttgtgtatgcagtgaggtatatgttagataaatatctactccagacagtcaattggcaaatatttattgagctcccactttcttaatcagccctgtgccagagacagacaatagctggggtctggggattgctgctgttggtgtgcggatcatgcagagatactgctaacgcttgctccctccatacctggatcgtggtattgctgacatcattgacttagaactggctcatttaaacaaattgcagatagcaaccatgtgggtcagcagtctatttggcctgctttttttttttttttttccggtggggcagtatattttggcaaaacaaaatctggtcaacaacaattgtaggttgttgtgatatagttgatgtgatctagtgactcttttccatttctaccaatcagttactggctttgtgccagagcgaaatatagattcactaccgagaataataactaaaagaaggaaaatataatcactttcaaatttatatagaatggtcctttttctttttctcagttttctacattacatagattcttggaaaaaaagttaaaacagtctgttcagatttaggaagatacttggattgctggggtatttttggtaactgtttagataatgtatgctggctgaggagtaaattcagctactgcttctgggtcctgaaataaacctttcagaaagcgaggcattgatgattagtggaggcagttccagaattcttagtatctactgtttctttttgtgatgagcatcttagaagttaaaccactcaccatatttcatagccttatattgaaatgattgttaattctaaaattcatttagaagctggcgtctaatttgtgaaatcttgagaaccaccttttaagattcagtgaccatatatcaagctacacacccattttaatgccctttaaattttctgttaccactggtatattttataataaattcactctaactaatgaattataaatgaccttggaaataggaatgtggaacattgctactgctgagcaagtatctttctgaagaagcagacataattccgaggggactggcatgtttgctgtgtattagtttattttggtgattctgaggatttgtgagcgaataagcttctatgatgaggcatcctgacacaatggtaagatcatgggcttggagctggtcagaccttagctcatttggaggcctcagcacccattttctctgcactccagcagggggtcagtttccttacctggaatgttggctgctgggcagggttgttgaaaaccttcactgaggtcatggatgtctatctgtggcatctgtatgtggcccctctcttctctgcctacctgccttcccatgtggggcttgttttctcattctctgcctggtcctgctgtacttcggggtgtggctgactcaggacaagcccttgctggcatcaattaggtgatgctcagcccctcccagctccaaaaatctgtgctgctttgaatttttaaacaaatagtgcctaatcagctatgcaccgctgaacagcttattaaaccacactagatcccagacatattctgtgaatataaactgagacctgtgcaaatacatagatttttgcattccactgtagtttcccttacagaatgtggttttgtactgattgggactcttgctcagcagttgtataaattggttttggtttacccacagagcctacggctgatgccattggccccaagctgctaccccattcaatatcccatccctaatattaattagtggtctcttctctggccaacaatcattcctctgttatacttcctaaaccttcccactttgatgatctgcaaaaaatgactggctttttaggagaattactttttgcaaaggaacgaagttgcaaaaatttaaaagtaggcttcttggagattttgggtgctagactttggtctctcattagctaagtaacttgcttctgtgtttgcttcaacttcactgaatgtatgatttagacttgatccttagcaaaattataatttactatgcatggagggttagggctgctcttaaatagtcaaaacaggaatgtcaaatctaagagtaccggggtcctccctcaaatatataaagagcaattttttttaaatgctgagatttataaaactatcagggacaaaatgtaattctattatgaacaaatacttactgagcaccacttggtgcttaagatacacagagtaaagatgacatatgatccttaattttcccaggtgtattatcatagactcctggtgttttacaaagtggaaattaaagtgaatggctacagttttcttctgtagttcttatgcaaaaagactatattcctcaaagtgcaccatctaagaagtatttatggagtaaatgatgtatccaagctgaaactttcctaacgaatgtattattcatttccaatatcagttgcaaggaaatccgtttggtcagtatttgctattctatgtggaaggtcagtgtacttggagattgttctttggtgctgtgacgttgatgagaaagtgatcctaatttggattttgtattgggtgtcattcatatggtgatttttctgctaaagaaaagccttcacatcagtaacatgaaggatttaatactcagttcatttacttcactgtattgaactgtgtgcgtcagggctttggaactatagattcgtgtcatcacagcaataatgtgggcagaaggcacatgtttgtgaagagctcactgtgtgccaggcatcatgctgggtgatgggattctttggtgacctccacaaatggacaatgcaggaattaaggacaagtaaacatgctacacagtaaggtgtaaaggattttgtgaaagaagttttgatgttagagggtcactttatatagattaggttggggtggagttgaggcaggaaggctcctacagcaaaggaggtctgatgagctaagacttggttaatgagaaacaaacagtgaaggtaaagaggcatggggcttggggcaagggctagagccaaaagctggcaggttagagagcactggaagattatgcatttactagctgtgtgacctcaggcaagtcacttcgcttctctgtgctgtgtggtttcctcatttgtcaaagaatgggaaaggatacttaactcatggaattttcatgaggactaaactttataagaaacgtgtatgctgcttggcaatgaaaaggaccttttaatagagtaacaaaggattgtattttctcatgaataaggaattaaaatgagttagaggcaattctctattagttaatttaacaagttacttagcagcctatcggtctttcagagcaaataggtttatatttgaagcttagttctaatccataccatggcagttttcaaatttcctgatatgtttttaccttgtccagtgttaggaaaagtaagttattgagcaattctaaaatgtttactgtagtttgcctgttttttaagcagtcatatttttaactggtgaggaaataaattcagaagatttataattgaagaatttaattttcctaccatcagtaaacatttagtgacgttggtgtaggggcactgtaccacagaagtagatatccagaaaatatttgtaaattgttaaacattgtattaattgttgagcatagagtgatgtccttagattactgagtaaacagtggtgattaaattaattaagatagtttgtggggtgtttaaattttacttagtattccatttaattagaaatacagacaataactctggcctcataagcaatctgaattttgagttgaaggaaatgggtgtctggcagacaatttccaaattggtaaaatggatcttttgcttctactttattttcttcatgtattaaacaagtatttattattgttgactgttggaaaattttaaaaattacagtcatactttttatgactttgctgggtgtggaaatcatccctttccccccatcttagtgccaactgcctttaacctgaattggctgatgcagaacgcatttcaggaaggcgccatgcatacaggaggcagagacatgccctctgcaatcctgacttttcctctttcacccatgtctattgtatatggcaagactctgtccttcctcctccactctgatattggtcggagacacaagcacttagaagcaccagtgttttattctacaattaattactgaagagggaaattgaaaggtaagcagttttgtgttttatcttttattatgcattaagtttctgtaattttccatattgctatattattagtgagaaagagaagaatagagaaagatggagaagatgaattttatttaagacagttatatttggataacttaaaagaatatgcttttttagtctaaataccctttcccagtctaagtagtttcatgcttcatggaaaaactaatgcaaagaagttgtaatcagctgttaagatatttgagccagctggctgtcaatatgttgaagttttattcttggtgcatccacaaattccatataaatgtattttatgaagaggaaggtgtactagcatggctaaactggtaaagctgaaatctggatttgatttgcatatgtggtatttttcagggactctcaaactttcacacatgaaataaacgaggtaatgtgtatggcatcacatgatcaaaatatttttccccttgctgctgccagagctatctattgcttttcaacagtctcacttgttgggcatcatgccaagatgtttaagacaaccccttacgtgagctgttccattcttaacctctttgactgaagtgccgtgaccttcacatatgtagattagccatgtgctctgtgaattgaaacttgctgcctcaggaagaaaagggtttttctttttattccactgggaatttgacggccattcatccctgacctgggcagaggtaatgcaaggaaattggattcaaacggaacacggacagataacacagggaggcagtcagcgtgtacaggcaggcaagctttctacctggtccagggtgaaaatacccaccgtctgttcacaatgtgctgatgtgcaggatccgaagagcaactgacagatggagatagagagataaatgtaggaattctggaaccgtgtccttttaaaaaaggacattgttattatgggcattgctaattcgttttgactctcctctttctcttcctttccaaactatatttttgaaatctttgaatttttgtttatttcctaatgctaggaattaaatacttttgacatagtggacaatttagatgagtctttcaaaagcagaaatctttaaaaaaaaggagagatgaatgtatgacctgtatctggaattttgaaatgaattgatacttagaactttactcatatgagagttattagctttgtaatagctgagtatttttattatagcactgttatttatggctcttctaagtctttctctaaacctacatttctttatttgagaggcaagaatgagaagcagcatatccataagagttttgccaatcactcctgactagaatgacaagctgatttcatgtttccccaagtatcagtcctatgcagccccccctttttaaaaaaccatgcaaggccggacccagtggttcaacacctgtaatcctagctctttgggaagctgaggtaggagaagtgcttgaggccaggagtccaagaccagcctgggcaacatagtgagactcatcatagtgtaatgatgaataaaagtaattaatagcacatttttggatttttattagacaaagctagttttaaagaacatttatctttgccttgttaataaacatacttgcagttagtgtaaaattcagtataaataatagtcatggtgcttgagtaggctgataggacgagatgcataaggaaggttgtcgttataagaataatgggtctgaagtggtactccagctagtgtcttagcaaaaggaggggtgcttagggcagtctgaaatttatgagtgcttttgtatagctttcaaagctgagcttttcctgtgtacattagggtttatgaaatatcgtgggtcagagcatccgttacaggcgctgtgggagctgtcatagatacctggctctttccgtgggtgtaaaataggtttagtccttaggatgtctgtgtagggaatgtgcttaatggatacgatagactatgggggaagcagaattatccttttatccgaggatgacttgtttctttttaaatgaggacaatgaaaaaaaaattgggggaagtatcttatcacagtcttgtagaatgtgggggctttcgtggactgcagttcgcatggcaggcataaggagcgctaatccagtgatgacagcatctttatgcctacctgggaagatgcagcagccagcacagccctaatatcagattaataccggggtgggggcatgaggcatggctggcacctgagaaggcaaaagggaattctgtgattggagaagaagcaaggcaggtgtgtcattaaggtcaggatggccaagtggagagtggtcctcctggtgcacacagtgaaggagagcagccagctgggtgcagaggaggcagcagaaatgtcagggtgtccgtgagtcagcagctgagcattgtgggattttttttccttttctttgagacagggtcttactctgttgcccaggctagtgggcagcggtgaggtcatggctcgactttctgggcttaagcaatcctcccagctcagcctcgtgagtatctgggcctacaggcacatgccaccatgcctgcctacttttcaaaatttttgcagagatggggtctcactgtgttgcccgggctggtcttggactcctggcctcaagcagttctcctgcctcagcttcccgaagagctaggattataggtgttgaaccactgggcccggccttgcatggtttttcaaaaagggtgggctgcataggactgatacttggggaaacatgaaatcagcctgtcgttctagtcaggagtgactggcaaaactcttatggatatgctgcttctcattcttgcctctcaaataaagaaatggaggtttagagaaagacttagaagagccataaataacagtgctataataaaaagcaatagtaatagtaataatgactaccattaatgcactcctagtatgtgtgccaaggcacattgcacgtattatctgcaatcctttcaacagtcttgcaaaagcatcatcattatctctattttatagacaaggaaactggtagaatttagaaatttgttcaataccctggtttttctggtgctaaagcctacattctttccactaaactagtggttttcaaacccagttgtgcttcagaatcacctagggaagtaacccctgcccccaggaactcagatgccatcaggctctggagtggcctggaagcccacctttctgtctgtcagtagggccactgaagagcaagtggtaacatttaaaaaaaaagacttcttttttgttattgctaagacatgtaaaattgcattcttttttttttcttttctttttttggagacagagtcttgctctgtcgctcagcctagagtgctgtggcatgatcatagctcactgcaaccttgaattcctgggcccaagcaatcctcccaccgcagcctcctgagtagctgggaccacaggcgcatgctacaatgcccagctaatttttaaattctttgtagagatgggggtcttgctgtgttgcccaggctggtctctttacattctgggcggctcaagcaatcctcctgccttggcctgggaggcctgggagtctgggcgtagtcattcacatgaaccatggagcctggcacattctttttttttttttttttttttttttgagacaatttcacatcatcacccaggctggagtgcagtggtgcgatcttggttcactgatcgcaacctctctctcctgggctcaagtgactcccacctcagcctcccaagtagctggagttaaggcacgcaccaccacacctggctaatttttgttatttttttgtagagacgggggttttgccatgttgcccaggctggtcttgaattcctgagctcaagtgatccactcaccttggtctcccaaagtctgggattacaggcgtgaagcccttctgcacctggcccacattcttataattcaggagcttttagtgtattttggctctgtagtcattatcagacatagaagaggcaagaatttgggctacaagggctggagggtggcattgggattttctgatcacatcaccagacattaatttacatttgttcttcagggaaactccctaccattatctgggtcattgctccctaccaccgtctgggtcattgcatagttacccagggtggccgtgaactagtcagcagccatttagaggaaagcctgcttggcttggctggttcaggaggcggaggctgctgcagggcctgggaaggagtaaggcagcacacggtggctgttaggtcatttgtgttggatgaaagagagttggtgcacagactggacggtgtctcagattcgctggggtttacgagtccagaaatccatgagtccgaggaagtgggaagagagaataagggaagggaggccggaaggtaggagagaaggggaaatccaggcagccggatgagagataattttagagtaagaaaccaacaaaatataatattcattatgtacccagattgaagtactatggtgctaaaagttgtcaaccaaacaccaaaattagcatatctaaaaatcatcaagacggtaatgcatagttaaaagaacagatgtaaggcagaaaactcctccagttcttcagtgaggttatttcatgacatagagtcttgattatttctgtctttgtagccacacggtcattttggagccagattcagtggtgttaggaggttgtggaaagcactcagcggacaccttctttccctccctccccaggctgcccaggcctcctcaggtgtgggagggctcccgagaccctctgcgcccttccttctcttccttattattactgtgccttatgggtaaagtacagtactgggaagtttctctttatgtccccaactattcctctcttctaattgccaataaaactacatctcacagctttttaaaaaaaaattcagtttagctcataaccttgtcttagacaaggggtgtaagttaaatttcacgtaagcggtcctgctggggttcctgcgcggtgggaaagctcggcactgctctgctcatgcctgtttgcggtgggaaagctcggcgctgctctgctcatgcctgttgtctgggttttcagcgtgtgtgctcctcatctgctttctctctaatttgaggctgagactgtttccaagtggcatacccctgtaattctgtttttagcttagaattaaatgaagtctttgctgtctcttgtttcctatttcataatatttcatcttgctttattgtttatggtaatgtatcactatcagggttatcatggatttccagtttttcaagttaaagctgactgtgcctaacccatctcaagcaaatcagtgggcagtttatttttaagagcccacaggaagaaaaaaacaacaaaatctgtaacctgctttttaggcttttgccatgtgtctgtaagactggacctttacttttttttttttttttttaaacttatgaagggactgggcatcttcatgtcttagcagccacgtttaaatctctgtcattatgatgaaaggtatcttttgcctagaaagctaacacctgtctacttgtgttatttctttcagggaatttcagtagtaatgtatcattcatctagtggtaagattttcagcaatgagaacattctgaagcagctgagaaagccctaataaaataactgtcagaatgctcatgagcttctctctgttggagaagaatcaagccatttcctcctcttccaggcatagagaatagttatcctttttgccatattacaaggacagagtggagaagttcgtcatgcagctgtgggcgcaggctagtgtgtggggctgggggaagcagacaagtggtgagatggtgggctctgctaagccctggggtgggcgtaggagcagaagccagagcctggggcctctgagtgagtgggctcagtgaggggcaggcccagcctcatgtgctttgaggtctttgagagcctcagacaccaacctggtagaagaggcatttggagggatgccttccataccccaagaccctgggaaaggagagtggtgagtcagggttgggtgggtgggaggcctgagttgattgccagcagctgccagataccatgcccctttgtgtatatacttcctttattcatcaaatagctgctgccgtctactcagttgctgggtatctattcagtgcctgctgtgtggcagagtgttctaggggctggggataccacagtgacaaaacctagtccctactttcataaggcttaccttccagagaaatttaatcccagagacagcagaccaaccacccacatgggggtgctgccgtttattgtagggatgaacagcagtacaagggaattcaaaataatggaacattttcaaaaattggttttaatggagctgtagatgaatatgcagtaaaatcagtttggagaggagctatcgcagctatttctccagtctttcagatgcccggcctgagcctcttgtgccataggacagttgttaaatgtagcatttccattgcccgtggttgaaatgaccagtggcagccccgatgccacctttatttcctcaaggctggacagaagaaccttgcaagcgcaaggttcttgacctgactctatgggaaggaatcatacagtgctggattttttgaaggtgttcctgcttttggatcatctcatgtacttggtgccaggctgtggttttggatttggacgtgttgggttgagatggtttccagacagctcgatggagatgctggagcagaaggaaaagagggatgtgcagttgaggcgggcacaagggccgcagcctgaggtgccagctgagaggccaatgacactgccctgcggagcacgtgcctggtgaggagaggtgcctgggcgttctagggggcaccaacctttagggatgaagaggagccacccagagagccagaaagggcgatggaaaagctgaggagagttccacagggggcaggaagacatgcacaactgaggtgagcactgaggaatgcccagtaagcctgggggctgacattgtggtcatttcgtcactggtgaccttcagaggagtggtcgggaaggcggcagtttgcagtaggtggagcgagagatggataggaagccagaaaaaggctctggacagctggaagaggagcggggtgtttgatgtgttgttcttttgctggaagagggtggagcgcctgcgcctgccgctctgctttctctgctgggtgctgtgctggtcgctccctcctggggcccctgcatgtccacccatccttcctcctctccggtgggcctggagctgctcaggggaaggcgggagcacgcctggctctttgtggcccagtgcctggggtcgtgcctggcatgcggtggggctcagattatgctggtggtggtgatagagttcccttagcactcctaggtgacaggctttcccctctgcatttcacagattctaaggtaacgtacaacgaagggtgcatgcgctttggccaaggccatgttacatgatggtaccaggagtcagccctgaggcagatgaactccaaagcctgtgctgccctcgctccttgttgagggtggagaatatttcactacctttgtagactgaggggaagattatttacaaatatttccagaagattagttttgtaatatattgaactaccagtatattttggatgcctttgatctctttggtaaactggattgtcaccttgatgtagtgagtcagctggcttggtggaggcatctctgagtgtctggagaaacttcatagagattattgcatttggggagttagttttggtcattgccacttgtgtggcgaaaatcttgggttaaagcatggtcagcatgagtaaatgttgttaattgtacattttctctttaccccctctgaaaccttatgtttgagagctgtcattcaggattggatactaaaaaacttggcagttgtgaaatagttttctctctgtgtgtataggttattctctgatgttaaaatggctaatgctgcacaggtgtgtatttcctaccatatatttataaaaaaaccactctttaaatttcaactcgtgtacatgtcccatctcaagtctcaagtattacagactgtaggtcagattccctcatgatatgtggaacctcaaagggaaatcaattgttttgctgttgtagtgaaatactaagtattgaataattaataatataaaataattcatcaaataatttctaggtgccaagcactgtgctaagaactctatatgcattttctgtgaggtaggttctattactgtactcatttgaggcacacatctagcgagtggcacagctgcagtttgcactcaggcattctgaccccattgccttttcatatatgctgtattgcctctcaggagggactggaatgagtagagttggacaagtggtctgaatttacattgtgaaaggtggcgttatgatagattttttttattgcttgcttgcgcattcacatcagttgatatatatatatttggacacggagtcttgctctgttgcacaggctggagtgcagtggtgctatctcctcactgcatcctcagcttcccaggttcaagcgattctcctgcctcagcctcccttgtagctgggattacagatgtgcaccaccatgcctgggtaatatttgtattttttagtacagatggggtttcaccatgttggcaaggctggtctcgaactcgtgacctcaagtgatctgcccgcctcagactcccaaagtgtgaggattacaggcatgagccaccacacccggcctcaaatcatttgatattctatgaagatactggaaaagctgatgaaagatcttcctttccctccaagaggataccatttggttagagagacctgtgaaacagaatcattgaagaagctgcgcagtaataagactcccagccagcaggtgaaatgagttttcttgttttcggggtcctaggtgacatggctctaaggtgcccacccggaaccctcacccccacccctgccatggaaaacacttttattatacacatccctcctgtcccaccagttacaaagcagatttgaactgaagcgtatttcttcttttgatgagaatgtgaaaggggatctttgtacttggttagttttcattacaattcccctttcctaaagagaaaactcagaatcaggatgcatttcatgtgtctgaagaacctttttccaacataaaaccttttcagcattaaaagtatactctgaaatggctctgttcagtatggcagccatcagctttgtgtggctatttaaattaaaattaattaaaattaggttgggtgtggtgggtcacccctgtaatccaacactttgggaggccgaggcgggtggatcatctaaggtcaggagttcaagaccagcctgaccaacatggtaaaacctcgtctctactaaaaatgcaaaaattagccaggcttggtggcaggcacctgtaatcccagctatttgggaggttgaatgaggagaacctcttgaaccctggaggtgaaggttgcagtgacctgagattgtaccaccgcacttcaacctgggtgacagagcaatactccatctcaaaagaaaaaaaagcaaataaaataaattaaaattaggctgggcatggtggctcatacctgtaattccagcattttgggaggctgaggcgggagcatcacttgagcccaggagtttgagaccagcttgggcaacatagtaagaccccgtctctacaaaaaattaaaaaattagccaggcatggtggtgtgtgcctgtagtcccagctacctgggaggctgaggtggaggatcacctgagctcaggagttcgaggttgtagtgagccactgcactctggcctgggagatagagaaagaccgtgtctcttaaaaaaaaaattaattaaatgaaattagttaatgtctgcagtggcattagccacattgtatgtgctcagcagcacaatctgttgtcagtagctgtctgtcataagttgcaaaatagatctagaacattctcatcactgtagaaagctctctgggacagtgttctagagactcttgagttgcatcttgtagtatttataacaatttaaacctactagtactgtgcctggctcttagcaagtgtagaatgtgagctacttgaattttggatggctgtcagtagggtaggatcttgaataatcttttttttttttttttttttttgaggcggagtctcgctctgttgcccactctggagtgcagtggtgcaatctcggctcactgcaacctctgcctcccggtttcaagcaattctctgcctcagccttctgagtagctaggattataggtgcccgccaccaggtctgggtaattttttgtatttttagtagggacggggtttcatcatcttggctgggctggtcttgaaactcctgacttcatgatcacccacctcgccctcccaaagtgctgggattacaggtgtgagccaccgcacccggcctcatcattgtttttgaaactatctttgatagtacaaatgtattgcagttatctaaactttaaaaataatgaaaaaccattaaaaccacattataaacaaggaaagattttttcctctgcttgaagcatctatccaggttctgccatattgtctaaggatggtaagagcagggtggggtctgtgtttttgctttttttttagtagtagagaaaaggctgtttggaaccaaacatgtggaaggctgttttacttcactttgttttatatccactgaaaataaatgtaagtttagttagtgttttttttcttccacgatgtttgaaggaaagtccttgatttctgtctgtgttgcagtttgaactttaacctgtggcctggtagttgaaatggattgtgcattttggtgtggaaaaaaaatcgaattgctttctcgaaattgactaaaatgttttaactcttcatagcaaatgaggcgtgaaacaaattgtcaaaagcatggagacaaaattattgcagtactgaatgtttaactggttggtgctgttctatcgaaggtgtgagccaagcagataaatgtgtaaacggcacctttctccttctctcctacccaatttttcacagcttgtcttcacgaggagacctccatctatgtcagaaaaatcacagcccttctgaaagtgttagattatagtgttgctatgaggaataattaggaagtcctgtaggctatggattagaagaaataaacttcctgtttgcaaacattttatttcacatcatcattagatgaagcaaaaatacattttttagtgtctctgaaagcttgatgatatgtaaaggatgttagttatttatgttcatattctttcgtattcattcattgtgtttcattctacttggaatattttacccttctttttaggatttagtagtttgaataataatgcttaacctgaaaaataataaaatatttaaatcatatactttttagttttaaaatatcaaatgttaatttaaggaatgtccagaggtttaataaggaggacttcaaatttttgactgttccttcacttttctttttgaagcttctatttaggttcttaggttaggatttctcaagatccccacctattagatggctacagctctcctagcccctggggctttgatttctaatgtaggtcattgaatggccaaaacagatgtgccatacagagtgcaaagcttttaaataaggagaaagattatgtattggcattgtttttttgtggctaagtataagttgagggttattgtttatatttctaagtatttttagcatctcataagcaaagaggtggatgaatatatgtgtacatatgtgtttatgagtatgtagctgtgtgttatttgtgtatgtacacaatatgtttcacagttttattataactacaaatatgaaaaacaattaaagcgtgatccttatgctaatgcagctgattatacttttgcatgtttccatgtagtttttatttctgatgggtgtatgtgtgagtataaacattttttttctgtcctcccaacctattttgtttttttttaaattactgctatagcgataggtatatgtaaagagtataggaaattgattatacaacttccaagcaacgatgttttctttttatcagattgactctagtatgcagagatgatggaattttcgtgcatgtggtcttgtacatttattaagccttttcaatgaagatttaagagccaacattttatttatgaaattcagtccacatttataatgttgtataatagaaatgtatgtacatttcctgtgatttttcagtatagaagaataatggatcttgcaaagattgtagttgctgttacttacctttttaagagagaaccaaaatattttcctttcctttcctttcgtttcagtgttctctaagctgtgtgtctatctataaatctttatccatccaccatcttcctccctctgtacttacctgtcttaaacttacctagacttacctttgccttcgttttgcatttatgatttttccctcctttctcttcaagtgaatgctttatttttgttttcatggtgtgtttttttcttgctttcattttatctttttctcttttttttttttttaaattccttttttgatctagttcttcctgcccctccacagctgcccacattgagtgggttagttgtaagtgtcccattccacatcctgtcttgggtgggctttcctgtaagatttttcctgggtgtctgttattacctttttttccaatacatattaaaacaattggccatttttcatcatgtttaggaaacacttagccttgttttcctcatctgcaaaatagggatgatgaaacgtaatttacgtggttgctaagagagctaaattagttgaggtgtgtaaagcatatagctttacatccaatgtgaaataagtgttcattaaatgttagtggcagaggtaatagtagttgtaacgttgaattgcctggtatgatggagaatgtttctaaagaacacccctcaaggctgggcatggtggctcactcctgtaatcccagcactttgggaggctgagactggctgatcagttgaggtcaggagttcgagactagcctggacaacatggtgaaaccccatctctaccagaaaatacaaaaattagctgggtgtggtggtgcacgcctgtagttccagcttcttgggaggatgaggcaggagaatcacttgaacctggaagcggaggttgcagtgaactgagattgcaccactgcacaccagcctgggtgacagagcaagactccgtctcaaaaaaaaagcaaaaaaaaaaacacccctcaattttggattacattgataattaggggccagatcataaagagagctttatttactgtattagtttgttcttacactgctatcaagatatacctgagactgggtaatttataaaggaaagaggtttagttgactcatagttctgcatggctggggaggcctcaggaaacttagaatcatggtagaaggcacctcttcacagggtggcaggggagagaatgagtgcccagcgaagggggaagccccttataaaaccatcagatttcgtgagaactaacacaatcacgagaacagcctggaggaagccatccccatgattcaatcacctcccaccaagtccctcctacaacacatggggattatgggaactataattccagataagatttgagtggggacaagcctaatcatatcaacgtatcatgaaaagattacattttattccaggggtcatagaaaccattgaagaattttactactaagagagatgtgatctgattggcaaaaaaaaaaaaaaaaaaaaaagaaattggccctttttgtgtcttaatgttcctatttcacccacccttaaaatataaaatttaaagattaggcagtattactaatggccagtacttataaagtgacatgtaaataggacaagagtttaacaaatgtaaacatctcactaaattttagtacttcacttaccaacccttggatgtttagctaataattgctaattataactatgcatttgtttgcttatactactctggcaggaacaggcctctctcagcttactcagtaggccaagttagagattctgggttgggccctagtttttcagggatgtagtattggctcattggatttaaatcttagggaaaatctggtggagacactttgcctccacctgcagcctgctgtgctggatgtgtagtgagggaatgagacaggataggcccgagagtaaagtggtctgtttgaatccccagttctgccactcattttttgtaaaatgggaataatgataatatctaagttctggggttattttgaggattaaatgaggtcgcatgtttaaagcatataggatgttgtccgagtgtcagcttttattgttaccattactattcttgaggaaacctagcaggtttacacttcaccaaggaagggcagctattggtttgcctataggagtatgctctctctgctctcagagggcctacaagaaaattttttttctatccaaatgtcacctttgcttttattttctttcctttccatacacggaagaaaaaataggaaaaagaattacatatactttgcaactttttaattatttatttaattttatttttttttagagacagtggagtgcagtggcaccattgtaactcactgcagcgtgtaactcctgggcttaggtgatcctcccatctcagcctcctaagtagctggaatcacagatgcgcactgccacaaccagctaatttttaaatttttttgtggagatggagtctcgctgtgttgcctaaactggtctcagagtcctggcctcaagtgatcctcctgccttggcctcctgatgtgttgggattacaggtgtgagccactgtgcccagccacatttttcagctttgaaaccctgtaatgtgagttccccctcactccagttagaaagctcatttctaatttccgtattggccactttttctgtgtcacattcactaaattaggtttaatggtgggtcccaaaatcataaccataaaccttgttgaggttctgttttcttgtccataaaatggggattaagtgaattgctggaagggtgcgttgcccaggtcctcaataagtgataaactcacgttcagcacattcaacaaacttttaaaggtttttaaataaaaaaagcaaaggcttatggtctttggaaggttcttttagtttctcaagttgggaccccatgccttaccgtgccactgagttgaagaacaggttctacctctggctttcagaacctccttagagctggtttggaggtgttcctgctctctacgtgtcctttcttctaaaaacacatttcacaaaaatacatttcacagactttactgtatcatattttcaaccagagtttaaatggggattgtttggttttgcttaataatactactttacagatgatttaataatttccaaagtgcttttcttatctagtcctcacagtaatcttgcgaggtttggttaatatccctgtttcgtgtgtgctgaagcagaagcacagtgacttggctaaggacacgactttatttcaaaccaggttttgtgacccaaatctgagcttttgcacctcacactgttgctgtggtgtgttacagtgattctttagcttagagacacgtttggatcagggggtcagcaaacttttcctacgaagggccacatagtaaataattcaggttttctgggccagatgatgtttgtttcaactactcagctccgctgaggcagtgctgaagtgtccatagacaatccgtaaatgaacgtgggaggaggctgcgtgccagaaaagctatggatgctgaaattgaatttcatgtaattttacatgtcttaaaatattcttttgatttctttcccccaaccatttaaaaatgtaaaacatattcttagcttatgggtcctacaaaaaccaagcggtggaccagatttgtctggaggaccgcagcttgccaacccctggacagcgtgcgtttttccatttccagttccgtccaagtattgtgcacccccccaccccccacccagtgaagcatctttgtttgcacaactctttattctctagcatctcagctaacaggaagctgggagaaagttcagatctatggagtggaagagcccagggtgaagggagccagcggatcacgtggtgtcggaaacgccttaagcaagaagcttgcatgtcagaaaccaagctcagggttctctgttgtgttttggtttttactgcccgccatctagttgagtttcttcatgttctaggagctctgtcagttctttaatttccccccactagagttttgaggttttttcttaaggtttttttttttttgaaaaagagagttacagacatgtagtgcattagtatagtttgattattaaaagattcaaacgctggcaaaaacgtgtatgttgaatatttaaactctcatttactgcttccccttcccagaagtatatgctcttaagttaaatgtgtcttttagttgattttaaaatactgcatgtgaacatagacaattatataaatataaacatctgtatataagatgatattgtacgtgttctctgaccttttccttacagaaagttccttggatcacaccacagtggttcgactttttgctttgggtaatttgttgtgtgagcaagagaggttctcagttgtctaagcagtcactgaacagtgaaaaaacacaatatcattttttttgctgtggactgtggaatcattttagaatgtcaccctcttttgaggcagttggcaggatttgcccggaaggatcaggatagggtctttgggtctgagtcctgcgtgacttccttttctgacagcctcagatgcagtcctagactcccgtgtcattgagcgctgtccataacatcttaccatgagtgtgctataaaaatacaacctcttcattgttaagccgtgttactgttgaggctttaaccctattgtatcccaaagcagaagcagaggtagatatttcaaagtaattggatttagtaattgaaatttcaaaagtaattgagagatgagagcgtttcctatttggaagacatcagctggattttattttatttttcccgaagttatttgcattctgtcttgttagctttagaaataagaacagggaaaacagaaaggagaacatgtagtggtataatgtagatcttaaaatacttcagagttctcattctttttttggtatggtactcaataggtattctagtcaaatgtaggctatgactttgtaaataatctctcttgaaaaaagggagccttcattgtgttcttggcagcctatcacgtggtgctcttgtgagtgtgggctccagcctacattgaccgtgaaccagagcagccctgttactaaagtcaatgcttgtaattctcttacagtcctcataccacagatttccttgcaatcatacttttttctttcattctcttttttacctgttttgttttcagtctcagctaaaattgaatatatataagtgtactaactctctataaagaagtctttttctaatctacatgccactatgaaaattgaaaataaaaacattatctgtattgtttaataaggatttattcattagttgtgcacattctttatttgttcatttggttttaaaatatcaatgctcttatttttacttgatgaaaggagagaaacttcttttaacgaatgtttttagaggcactaaaatccttgattaaaaacagtgttaaggatttgtatttcattgtgctttgggagaaatgtcttaagatttgtacacacgagtttgttttatctgtgtgactctaattaaagttaatcaaagtcacatggcttagcaaatcactgaagtttctttttggaggtttttattcattttagtaatttgatttgttgatttgctattaatcttttaaaagtaaaacatcaataacctaattttataaagtatcaggtgtcttttttttggcctactttacgttacttactctgtactttcaagcaggcacataaaggctcagtctgtttcagctctgtgcactgctgagcagtgtcttaccatgactgacctcctgattaagaggaagttagcacgtgagagccacattgagtctgctggccttagcttcatgtgctatgtgagagatgtggtcattttgtacacaggatgttataatgggatattgacattttacggatccagcatcctgtgtataaattaagctttctttttaagaagacattttacagttgtaaaattctcgcctatttgaattttgagatcttgatgaaacataatccctggagtgctcttccactgttgcagtgtaatctttccatatgatatctgatttagttggaagcaacttagtaattatgcatgcttaaaggaagcaacttaataaacaggattttagagaaacccagtcagaattgtaaaatggtactgctgaatcaattgcattacatagaattactgggttagatgtaggtttgagataagtgggcagacctgaggctcctgtaccaccaccattgtcaagagcatgtgaagatttgcctttttcaaagaaaaaaaaaaaaaaaaaaaaaggactccctttcccttggttcgttcaaaaatgattcaaaagtagccttctcaagtctggtggctgagggccaccagaaagtggagcgggccttggttctgacatgggcttagcatggtaggctaggtaaagtcagctctgtggaggtgggcacagtttgtcatgtggtcaggtggcatgcagaggacaaaaagatgcagctctgaacttgaggatttaagcaatcatctgggaaatcagcacagcatgtggctgaggaatcagattcaggagggaggtgaagactgtcaggtgcagcaggccccatgtgtgacctctgctgctttacatgtgaaatataggaaggggaaaaataactattgaaaatcatttctgttccttgtcagcttatacacatgtactattaaatagtcacagtttaaactacttattttcagttcactattttgtacacattgtcctatattggtattattgctagcatttctgcaattttttgagttagaatttagggtgacctctcaagaatattttgtcatactgattccatctacagatatacgttgtggtaggttctggttataaaagtgtaaatggtaacagctgccatttaccaaagatccacctgccagcctgcctgctttatagatgaggggattgaggcctgggaggttgaggaacttgcctcagctcctggagctgcgttggattcctgctctcattctgtcttccttgtaaagcgagaggggtgttctcctttggtttgtaaactctcttgctatttcacagcctctggtgtccagaagacacataaacagacaatggcaaccaaaccttctaaattttagaacacaggtttcctcaggggtctctgatctcttgatcattttcattttgcctggtggtttcaagacaaacttgatatagaaggtgatccttgagtcaaggcctgaaagatgaggaatcagcccccaataacttctggaatcgtgtgtcttcaggcttctggagaatgtgagagcaccaacaccaatattttgcacagcagcaggtcttatgtgggaggggcaagagtgaggaagagctatatgaaatgtgtattatttgtattagcttgtggattagtttgctgttgctgcataacacattgagtggcttaaaagaacacacatcgattatgtcagtttctggaggttaggagtccaggcatggcttagctgccatactctgcttggggtcgtagaggctgtaatccaggtgtcagccgggctgcattctcatctagaggcttgactggggaaggccgcctcagactgttggcagaatttatttcctggtggctgtagaattcatatctgcctgcttcttcaatgccaccagcagagagagaatctgtaacttctgggaaggcctggaccctcttttaaagggctcaccagattatgtcaagcccatccaggccactgttttaacttaatgtcatgtgattaaggaggggctttaattatatcggcaaagtctcttcctttgctatattttcttagttagatgccagtcacaggtcttacccgtactcaagaggagaggattacacagaagtgtggatacgaggggcataaatcccatggatttattttagaattctgccaactacaggttgtgtgttataattcataaaaatagcagtggtttctgttggtctgtttatgctgccatgacaaaatgccagacagaatttctccctctcagttctggaggctggcagtccgagatcaaggtgctggcaaggtagttttcattctgaggcctcttccctgggcttttaggtagctgccacctctctgtgtgcccacatggtctttctgagcatgtgcagggggagagagaggatgcaagagcctgtgcatgcctgtaccagaagcctggtctctcttcttataaggacagcagtcctgtcagattagaacccatgctcatggcctcttttaaccttcattacctcttcatagacgctagtcccaaatacaatcacattggacattagggttttgatgtaggaattttggtgggggacacaattcattctgtagcaggctaagaaagtcttctagttacattctgcttatctcaagggatatcagttggggtatatatatagatgccttccccaaaaagcatcatgacccttatattataatatgaccttgggcaaattacctactctaggagatgatttccttcaactaaaatagtggttggcaacattaactactttgcaggatttttgttcgcattggttgtgctgtgtgtaaatcacctatagtgtgccgagggcacaggaggtgctcattaaatgttgtctgttgttgctgtatttgtgccttgatatttctgcatctctctctctctcttatttgaaacagggtcttcctttgtcgctcaggctggtgtgtggtggcatgatcacagctcattgcagcctcaacctcccaggctcaagtgatcctctgtcctcagcctcatgagtagctgggactacaggcatgtgccaccacacctggctaatttttgtattttttggttttgctatgttgcccaggctgatttctttttttaattattatctaccttaaatgaagaattccccatgaatccttccatttcttcaagaaagaagtggttactctcccctgaactcataggacagtggcatttataagcctctgtcctatagtatttataagcttatttttgcagtgtattatttgtatacatcttttgtttcttctgtttcttaaagtcaaggaccttcttatacctctgcttatctttttcatagtgccttgtacattaatattttttcagtttaaacaatgttgaatgaacaaataaatgaatgggcatggcctctgaggtaatgtgtttcctctttcatctaaatctttgtttctcaatcctttctaactcatgccttcttttgaaaatgtaagtttccttacaccccttccacctttcagtatctcctcccaaaagaccaggcccgcagcccccatctcccttgatgggacaagctcgacttttcctacagatcctcaacagttgagattattttatcaagctccactttcatgtggtatgttataaaaaaaaaaaaaaaagctttcctcctttcttttccaaatagaaaattataatcctgggtgtgtgtgtgtgtgtgtgtgtgtgtgtgtgtatatgtatatacatacgtatgtatatacatatatatacacatacgtatgtatatacatatatatacacatacgtatgtatatacatatatatatatacacatacgtatgtatatacatatatatatatatattttttttttttgagacggagtctcgcactgttgccaggctggagtgcagtgacaccatcttggctcactgcaacctctgccacccaggttcaagcaattctcctgactcagcctcccgagtagctacaactgtaggcgcatgctgccacgccctgctaattttttttttttttttgtattttagtagagatggggcttcaccatgttgcccaggctggtctcgaactcctgagctaggcaatctgcctgccttggcctcccaaagtgctaggattacaggcgcgagccattgcgctcaggctatcctgggtgtgtattttaaccggaccctccttgtaaccctcgttcttatttatgtagcattcattcattttcacccttgagaattactgctctaaacaatttctgatatactgtagaatcctgttacaggaagtagtgaagttagaattaagtgttcaggtgcggtgttgtgtctccactacctttgcacatgtgtaagagaatattctgtcttccctttatatgattctttttaaatgacagggttaaactgatatgcatttgaatttgtcgaaccctgttctccaaaatgattccagtttgtgtcacttaaggagtgaccctagacatatattaggctttcataagacctttctctccagagcttacagcgctttgcagacattaccttatcaatacttagggcatccttgtgagccaagcaagaactgggagctgttgctgttttttttgcagtggaatagcacgagaagttcaggaggggcctgccctccagaccccatctcaaggatgtgtgcgctggtcagaccctgccttcatgctcccgcgctgtggattcttcacggtagcctgcaccacgagagtgggtacagtgtgccagcaaacaaaatgcctttggtcacaagataatagagtaaatttacaaggtgatgtttatttttaaaggaatacgtaagaatcaaaattccatgtactgaaaggaatgtaaaatattaatacatctggagtggtggctcacgtctgtaattccagcactttgggaggctgaggtaggaggatcacttgagcccagtagttccagaccaacctgggcaacatggcaagaccccgtctctacaaaaaatacaacaaaacttagctgggcatggtggcacgcgcctatggtcctagctactatgggggctgaggtgggaggatcacttgagctgggtaagccatgattgccaccgcactacagtctgggtgacagagtgagaggccctgtctcaaaaacaaaagcaccaatgtaaagtacatctggtctccacaggggacttcttttaagttcaaggtgtcttatttaaaagaggctgtgtttggaattggattgcagcaaatgggggttgttttaagcctgcccgcctctatattctggaagttatattatgcctttgaaaacaaattggcttggcgtggtcaatcctgcttttagttaatgttgaggatgtgggaaatgcaaccatgagcttgcgggagagatggggtcccaagatttagggacctgtgtagaattgggcatctttctgagaaggcagattgatggtaaagaaaagtagaatctttggctagtttgatgtttatgtgggtgcacttgaaataggatgttgtaggcaatgccgtctcacttttgggaggataatactcaataactattaaaaatcccctttcatcccttgttctgtactcctcattttttttttaatacaacaaatgctttttagcctaatctccgttaattgtgatgacaggtttttaggtgaagacccatcaattatcaatagactattaaatattaaatagtgagcaagaaattcaatataaaagtgtgtatgtaacaataatattcaaatattgttgaaagactgcgtgcttacgtgttttgagtatacctaaagtggatatactttgtgtctccattgtaaattcctaaaatttctggtcatggcttttttattagaaagtctaagaaaagaagagtatgggaaattgaaatggctggcagtagacaagtagcatgccactgtaagatagtgctctttttatcttgatatagacatatccagacatgtgtatattttgtaacgtagggtaaaattttctactgttgagtttgtccatatacattctagttattattttaagatagtaaagatccttcgtgcgctgatgctagattggtatattaattcacttagcagaagggtattgatattgagtgtaattagcatgaaacactttgaacttttttaggctgaaaaggataatgtaacttctttagttttcctcctttctccctttctccccacacccatttttaaaataacagtgcttttcatactgtcagaatttcatgttgtgacaccctactcagaagttatgacagcagggtaatgacagcaactgcctcctgaaaatcaatcaggcaattaattttgtaaatgaaatgctgattatacaaagcttcacatgagaggcccagtgattaaaatcaatttaacaaattgtttcaggtgggacttgattaataatttgccataaatgctaaggatatatgaccagcataccttgttgttgctgttactatccagctatatataaaaatcgacaggtaagctctatctatctttatattagtgacactttgcttgtttgtttacctaagtaggcctgggtaacagtgaaaatggaatgcatttttacatttttatgtcatcctggttcatgttttcctgtgttctgctttaaaaaacattgcccaggcaggtttgagttcaaccaagttaagtaagttttttctatataggacattttagacttttctcatgttaatatatgttatgaatcttgaagaatggtgtgcgctttatacacatttaccattcttaattacaataacatctattcatatactttgggaaatactgtttttagaatactagaaatagtgacattatagtatggaaattaaaaaatgcctatgtttggagcattatagtttgaattcagaagtcacttggaataggagatggatgtctttccagcagtcacataccaaacatttattaaatgcctgttataagtcagacagcatatcgattttcataattttattacttatacttgacacagctaggaagacagtacaatattgtttagaaaaggatggcttggagagaggtaagggttaaaagatgcacttgggtttctttaattttgtttttttattaaagaaataatagcaataatggttgtccattgggtgtcagaagttggggctataaggaaaattagggtgaggaaaaaacatatctggccttaaagaacttactgtctgataaaggaggcagagataaacaatgagttgcagttgatggtgataaattgagtatctgttaaataagagagctgtggggaacggtggagccttgtgaaggcaggctgctggactcactggtatttccccaggctggaagtgcgtcttccgtttacagggcagccacagctgtgctgggtacagagtgttctagaaatgggtttggagttgtgtgctcaggcatcggcttggtggtgcataagagggctgtccaggtacagggcgggctgaggcctgataggtcgctgggcctgtcaccttgaggctaaccttgtttgtttgaatttgtccttctggagtttggatttttcggacccctttatgtcctctttcttacttttgatcttcaaggaagtttattgataagatttctgatcaaagaatggggcagaaaggagaagtgtctctaacagtccacattctttttgataccacagcataatcagaaggtctggcagggagggagaagggaagattctagaattatcgcacgttagaacaataaggaacttcatcccatttgccctttaattaaaaaaaaaaaaagaaaaaaaaaggccgggcatggtgccttacacctgtaattccagcactttgggaggctgaggtgggtggatcacctgaggtcaagagttcagaccagcctgggcaaaaccctgtctctactaaaaatacaaaaaaaaattagccaggcgtggtgggcaggagaatcacttgaatccgggaggtggagattgcagtgatctgagattgcatcactgcactccagcctgggcaacagagtgagagaatccgtatcaaaaaagcagcctgatgttgtgactcacacccataatcccagcactttgggaggctgaggcaggaggatcacttgagcccaggagtttgagaccagtctaggcaacatagcaagaccccatctctataaaaaaaattagccaggtgtagtagcacacgcttgtggtcccagctatgtgggaggctggggtgggaggatgggttgagcccaggagtttgaggctgtgtgagctgattgcaccactgcactccagcctgtgtgacagagcaggaccttgtctgactcttaaaaaaaaaaaccacacacacaaaacttttattttgaaataattttaaatttacagcaaagttgcaagaatagtgcagagaagtcccatgtaccttttattctgatgcattacatttttacattttgctacatttactttattattctgtctgttcatctatccatctgttcatccatcatttatttataatgcattttctcagaatcatttttgagagtaggttgtatacattccgcttctttactcctagatacttcagggtgtatttcctaggagcaagcatatgctcttacacacacctcagtgcagttatcactgtcaggaaacttagatttgattgcatactttaacctacagtctacattctaattttgtctgttgtcctaatagcatctatatagcaatcttctctccttcagtgtaagattctgtctggcctttatatgttgaatttagttgccctattttttttttttttttttttttttttagaatataagatttgaccatatattagtcatgttaacttgtttttctttaatgaagcacattacagtaagagtcaatatatgcttacacatagttacagctctgacaaattagatatctaatagggtcatatctctgaaaagcattttaaaaccaggggcaaatagcctgtgtatcagcatggcaagcaccctttgtcccaagataggtaagtcagttggtaattttcttatcttaactggcattttaatacaatttttaagttgtttatttaaaatattgataaaatagttggaaagaggcatggtagcaaccatagggattgctggggaaattagtaacttctctgtctttacgtagtgctctgatatgtgtttggaattgtttatccttgcaaatcacactaaacatcttttgaatggttgtctgagggaggtattattatttttacttgagaggtggggaaattgaggcttagagcacttcaataatttacttaacatttcatggctagtcagaagtaggagagagatgtgaacccaggtgtacctgatgacatacttttaggctctttccattttactggagatggcaaattactttttgcttgtgcaaattctgatagttgacacaactgcccgcaactctgcaggacaaaagattctgaggcttactggacttagagaaaataatgctaggattgattagcaatgtctgtcttctgcacattgatggaggagtagagggtttccatgcctcattgattattctggaattatacctccatataataatgatgataataaaatctatcctttttaaaaaaaaaaaacctgttatgtaccaagaacttgaatgtattatctccagttctgtaacagctctgaaatgatagtggtagtgttctttgtgtacagatccattaactgaggtgcaaggaagttaagtggtagctttcttcagtatcacagagctacaagtggtggggttaaaatttgacatagtctcacaaaagcttctttctcaatttgaatctgtatttgtatgggaaatataccatattatttctccttcttaaataagtgcttgctactaggctgtcagtagtgacacatggttatgaacaatactgcatacttagagatgtaaatgttagaaaatgttaaagccatgataaaagctttacaatttttttgggtagcaagagtaacaaatgtgaggaaaaatggaaatatattctattactattttggtattccttttagatctaatttactctcaaaataaacaatatatatagcctttggtttgttcataaaattattacatttgctaaattaaattgaaaagtgtagcttagtcagacagtaatttactcattgaattgacttacaagctgctgagctttgggggatgaagctaataataggttttgccaatttataaaaatcagggaaaaactagggaaccaaaatagtcttcctttctggacttattctgtagcacctggatgatagctataaatgggttcaatacttgtttttctcctcttccgtactcctgtttctctgggacagtctaggctgggggacagacattgatcaagtagtcacacagatgagcccactgttactctgagaggatcctgcccgggcctggagttcagggagggctcctctaaggacatgacgttggagctgagttctgcaggaggagaacagagctcattctaggtgaaagaatgacatatttgaaatgtgtggtttttctagagccctgtggaggccagcatggttggaggggagatttcctgctggcagagatggggggtcccacagattgacttggtaaggagctggctgtggtggagaggagaggaagggtcaggatgtgtcctggattctgacatgaatatctgggtggatggggtgtctttctctgaggtcagagagaggcggagaggagcctgtggatgtctgggcaggaatgctgtgcagagttctggggcttggaggaagcagccaagggaagcagcatttgggagacagaagcttggggaggtgatggaagccatggtctgggtgaacttgtgcaaagtgaagctttgtctgcagggaggggagactagaagggtctttacctcttttatctagtggtcatcaagaggcctacattctagttagagtcctgctgtttaagtggccatgtggtattgaggaagctgttcctttctcatgtcaacaaatgttaattatgccaggcattgtactaagtgctaggtatgcaaagatgaataagacaaaattttcaccttgaaattaacagtctgctggggagacaggaaaatatgtagattaaattattgagtggtttagctctgccttcaatttgctaatttgttaagagtaaaataaaagagatttaggaagttctttttatgtgataaatcctgtggtatctcatttaatccaccagcaacactgcgaggtgagtgtgaccgtattctgttgaatagcttaagcttacctagctaataagcagcacaggcaggattctcacccaggtttgtctgacttgaaaccccctgcctgctccgttataaccttttccccaaattatgtttctaaactttggatttattttatatattagaaaagatgtaggaatttgaagtggtcaagaggtggtcacctaaaggcaaatatggtattgtacttgcatagcaagagtagtgaaggaatgggaggtttcctgggaaccagtggaaaggtttctgtacggatctgcttccagaacgctgatgcttggatttaaataccagtctttatgaatagatttggtagtgagtccaaggctctgtctcccctcgcacctcttcagtgttttcattgatgaagacttgggtgaaatagtatgctgatttcattgatggttgatgtcaagctagaaaatgcagttactgtaatatgtcagatccaaatcaagatttgaaaaacaacctcatcctggtagaatggtgatcagaaataagcgaaatgcaaacaagcggagataaagaccaacttcttctactagggtcaactccccaagtgtctgataggagatggggaggtggggtttagtcagctgttggtggggatggggctgccaagagcgcagagctcttagactgtgttgtcagcagtgcaggttctagaaaaaggaagcaagaactgctcccccactccccccacaataccttttgtgttgagggggctgagaatgggtatatgtcacgcagaaaagagaaatagcttacagcgatcttcaaatattctgccaaaggaccaaagtaataccaatgggtataaatgacagggagcagacttttgttacataggaggaagaaattcataacattcattgtagatgctttgaaaggatttgtatgtacatcacttacggacccgtcaggctctctgcagttctaaggttctgagtttcattgctgaatctttgaatctttggtcaggctgtcttaagaattgtgataacgtgagaatatattaaagtgctttggaaatgcatggcatatgttgttattatttgataatgtaagtctgggatctttggatgggtttctagattagattccatgaactcctctgacactgtatgctaaattgagggttccatggttccacaaatacatatgttctctgcaccttgcttaagaaaaccaaaaccaagaccaaaaacacaggcagtggtcatctttctcagtcagttaggagtgttttgaggtctctcccccaacattgctaatgatgtcatggttagagggcaccgataatttcatggttcttagagttagtaacaaaacaaccttttctgccttgtctaatatcttttttttttttcagtagagaaggggtttcaccatgttggccaggctgatcttgaactcctgacctcaagtgatctgcccgcctcagcctcccaaagtgctgagattacaggtgtgagctaccatgtgtggccagtcttgtctaatatcttagaatcccatttcttgatcctttctgtaccattggaaaatgtgacaaatattcctgtattgacaaaagaagaacttctgtgtgttgatacccacattcgaagttccaacgtgttagttcaagtcttaataagcaggcagtgttttgttgtgagttgaagtaaaacacatagtggttttaaatgcagggttgcatgttatcctccttcagtctgatgatcgtgtatagacacaccagaccagagatgggactgtggacccgagttgggagacttgactctggtctgagctctgctaccgtgagcctcctttgtgtcattgggcatgagagaatctctttggcgattacattctgcagtagtggtggcagtggtagctgagattcttggttctttctggcttagagaggagtaggcacttgttatgaaacaagggaagagtctttagtgcccacttttacttttgccgtaaacgggtttttatgccgttaggagaagaacctgaccagagtatgcattcagtattatcattgtctttacttgtgtcttctgcaggtgtgtacagcagctctgaagtgtgtcccacagtggcttctgggtggtgccactggcatgtggtggggaacctctgtggtgaggtggagtgggcgcccactgcccactgttctgtgtgtgccgtgaccaggcgggtgtgcgagggaggaagacaggctagacggccgtgttgcatccacctcctgttctccctttacagagagccagagtactgtttgtaatatgctcagggaaaaacagaggcattttgagctatatttagacaccatcacagaaaagtaaacacagattgcttcccgatatgacagcaactatctacaggccactgtggctgaccccgatccttatcgagcttgtttcacatggctgtgatctgtgtgcatcagtattgaagaaatggcacgttacctgacatgtcttctctatgcccgtgtgtagtccgctgtgttggtgtgttacggccgggccatggattctttacttttgcacagttgggctgttccattttttctcaatgagtaggtgggccctgggctccaggtgctgccatagcccctgtgacctctgagagcctttatagcgctgatgaatttaatgttcataataattgcaaggtgggttttatttctcctttagtgaatgagaaaactaagaaataaggtcacagtgtactcgaggtccctggtgggacagggctgtgaatccattctgaatccagagcccctacttccttgctgggcagtgccattcggtacacagctgcagacgtgaataaacaccccctgccctgtttgagcgagagaaatagaacagatttcaaaagttttctttagttactggtaagagaatgttgtttcccgaacaatggttcaaaagagggaagagttttctatcagctcttgtttaatccacatgtgtagaaatgattttagatcaacaagattcgatagttctttcggtgggttttctttgttgttgtttttttttttttttgtgaagtgtttttccaatttgcggttgaaggaattgggctgaaaaaagtagtaaaatatgatatgcataaagatgtatctaataaactatgttcttaatttgatatttaggagcaaatacaattagatatcttttactataaatgcatgtgtagggatactctgaaagcctgataacagagtatctaaatataaaaaggataaagtatatttaaagtatactaaaagtatataagcaagttgtcctttaacttggatcatcttgaaaaggacagttggattcccagcccagcctctgaaagcctatctgacatgtaatatagctgaattgtgctacccaatatgcttagaagaatctatatacaaacatttcttaaaaatagacaatgtatttcttccttagagagagagagaataactcctacttacatgtacatccaaaagtttactttgaataaggaggaggaaagtcttatcaagtaaaaaaattgcattaaaagccaagtaactaaaaccagactggttaggttaagagctctttgaaaatggtggtgtatatattgtggccttcacagcacttgtcttattttctggaattgaaactcaagctacagcagttgtggaatgccatctagaaatgaaaacatgctcggacaatctatttagagaagttgttgagggctgttttcgatgtggatgataaccctgatagagcataaactttcagtgagaaatgaaaatggtcatacccggatagatgttaaaaaaacataaaattggccaggcgcagcggctcacgcctgtaatcccagcactttgggaggtcgaggcaggcgaatcacttgaggtcaggagttcgagaccagccttgccaacaaggcaaaatcctgtctctacaaaaaatacaaaaataagctgggtgtggtggtatgtgcctgtaatcccagctacttgggaggctgagacatgagaatcacttgaacccgggaggtggaggttgcagtgagctgagattgtgccactgcactccagtctgggtgacagagcgagaccctgtctcagaaaacaaaacaaaacaaaaaacataaaattgcttcaggttagatgtgcgtatgagaagcagcttggcccttttgttttccagaagtcttagatttgatttttttttttttctttgagatggagtcttgctctgtcacccagggtggagtgtgcagtggcacgatcttggctcactgcaacctctgcctcacaggttcaagcagttctcctgcctcagccttctgagtagctgggattacaggtgcccgccaccatgcctggctaattttttgtattttagtggagacaggatttcaccgtgttgctcaggctggtcttgaactcctgagctcaggcaatccacctgcctcagcctcccgaagtgctgggattacaggcgtgagccgccgcacttggccaatttttagtttctttaagggactggtagtgagaagcaggagttgagaccctcagttgtacatttttaatgctcaaaaatagaggacacagcaggatggatttggactgtggatgaatatttaataatagaccataaggagaagttaaaattaaataatttgcactgtatgagtatctgtttttctatctgaagtctcattgaaagatatttgatgcattttgagaggttcagataatctgtgtatttaatgctttcgattttcagaaatctgagggttaagctaacatttttgacatggtgcaaattaactgaattttaagtaggactgtgagagttgatggcagtgatgagacagataatacaaaacaattttagtcactgataagatgaatttgctgcactgttatctatagcattaaaacatagacattccaatcattttcccatttaacatttctgctttaattaaggcagttttggtcgtgcactatttgaagtgaaataagtagacgtttcctgtgccctgggctgtctagattgaatgtgaagataggactgcctcagggccccgtattggaaattcagcctgaaatttgatttactcagcctctccataggtccttcattcacttggctgattttgaaatcaccaactcagccttgattttcatacttccataaaaagttttacctttttcaagaaaatctagaaaataatcacattttatttttatcaggcataaattctaatttaaataattatgagaaaatgaattcttagccctagattttagttttactacaaatatatcaacatacatgtttgtacacttaattatgaaggcggctcaggttatgtaaaatcagtatattgtttgggcaaacaaatgtactgtcgtttaatttctatcatgttaagtccaaacaatgtcttggctggtgaaagtagtaacagtttaaaattgtatcacatggtgaattttgagcagaaaagttgcttgtaggctgtggggcctggggcaaagcaccctctttcctcctgtgtcctccacagagcttcattcaggtgagatgggttcctcctggcacagtcctgtggatcccttgggactgagctcaggtatttcctataggaagcctttgttaaagcccatggcagacccagtgagacaccctcttctcaccttgccttggtgctttgtcccttcaggacatctgctgtgttgcactgtgacctgtttagtctgtctccttcagtgaatctccaggacatggaggctcgttcatccttctgcttccagtgttgggcacaacgcacatagtaggtgcttagtaaatgtgtggtgaatggattcaccaaatctttaaagtgaacaccagagtattgaggaaggcagagaaggggaaggacccgtgcagccttggagtgggagtgccagtggaagagaggactggcagttctcggggtctgtgctcctgccttccatcttcacctcccctccgtccctcctcttccagcctcagccctcacctctgcagcgagactgtccttgccgagcacagcagtggcctccttgtcaagtatagcagaagcctttacccttcacctgactgcattcctgggctgcatttggcacacctgtttcgttgctacacctgactcccttccctcctgtaagagcacactctccagagtgtctacattttctggccattcttccagcttgtctgtgggttcattttcccttttcccttaagcggtgatattctctaggattctgttcgctacccattgttttcctttcatatattcctcctaaataaagttcatgggttttattgcttcctattgattaattcatcaattaatgtgctgggtacactgttcaacttatgccctggagatataatagtgaataaaatagagaaaatccctgccctctgggagtggatgtcctctctgctgacttctctacctatttttccaggtcaggccttactccccaagctgcagctcattatgtctcttccttctgggcattttcacctggatttcatatcagagcctcaagtttcctatgtaaaccactgaaggctcccactcctggggatatggtgattggcttctccctctgcacactccatctcatttggctgctggcttccatcactcatttggtctccaaatcctgccgcatttcccttctaactgtgccttggagctgggcttgcttcctcccaccactgctgccagttcaggacctcagcctcacctgcctgccagggcaacctgacctgcttccagctgggtcaggtgcccaagggagcagtcctgtgttcatctgtcagaggcagcctgagcctgtagaatgccctgcagggctcacccatgttctggcttctgcctgcttcagcatcttcgtaaattcgtgcttcacgtggatccagatggtttttatttcctgatacacaccaggcagttcatctcccttgacccagtgccttgtgctgtttcttctgccctgtggtactgtacatgctgttccctcccaccttggacgtgttattcccctttatcctggtaattcttttttttttttttttttttttttttttgagatggagtctagctctgtctctcaggctggagtggcacaatcttggctcactgcagcctccgcctcctgggttcaagcgattctcctgcctcagcctccggagtagctgggattataggcgtgcactaccatgcccagctgatttttgtatttttagtagagacggggtttcaccatgttggtcaggctggtctcaaattcctgacctcaactgatctgcccgtcttggcctcccaaagtgctgggattacaggcatgagtcaccatgcccggcctctttttttttttttttttcaagagacagggtcccactgtgttacccagactggagtggagtggtgtgatcatagctcactgcagcctcgaactcctggggtcaagtgatcttcttgccttagcctgaacagctcggactataggtgcctgccaccacgcctggctaagtttttaatttgttgtagagacagggtcttgtgatgttgccaggatggtcttgaatttaccctgctaattcttaagccttcctgaaagtccccatgtacttacctcagtgtgaacgcagcatctggcacacagttgggatcagtatgtggttttggaaggacagaggagggaaggaaggagctgctgggtgaatgctgcctgctactgtagcaccgggtgagggcctttctacctattgctttgttcctttgacgtcccaggacatgaagggctgaggctccacgcctagccctcctgtatgacctcggccctgaagcccagggcctgactcaccaaaccaaaaataaaattcaacatctacttgtgaactggttgtgtttggtaagatgctgacttacatggggagaggtgctgtgactcatagtctgagtgctcatccctacacactgctggtctctgaacaaaatctttaccctggacatatgcatgatctaaaatctatcttttcactttttaatgaacactcggttgcactaaggtttgatcaagacttgcagactcagttctaaaataaaatcattgttctaagaatactttgaaggcagaaaatgttaatcactcaataccctctgctcttattactagtaagctaaaaggaggtgggtgagcttaactatcatgctcttttcctgtacgcataatagaattttagatgcaaatgttttctctctgcttatggtccaaaatcgtttttagttttgtttagtctagagctctcttaattgttaaaaactcctaaaagtaaaaaataaaatttcttgtatccatctaggttttttctttaatgtcttgctggatgttttgtcaggtcattgtttttaatatttttaaaacttaaggatagttgtgttattaatgcatatgttgacataacacaaatttgtgcctttgtaataaagaatgaattaataaaccgacttcttttatgtcttcacagggcagcccaatggatccaatggtgatgaagagacctcagttgtatggcatgggcagtaaccctcattctcagcctcagcagagcagtccgtacccaggaggttcctatggccctccaggcccacagcggtatccaattggcatccagggtcggactcccggggccatggccggaatgcagtaccctcagcagcaggtttgtgctggtcccccgacccgctgcttttttgtaatagttttgtctttgccttttgctgtccacctaagattgatgttaaagagaattagggggcattgcacggattttctgctttaatttttattgtttctttaatcacaggtataattttttttttcttttaaagatggaaaggtgagcttcttaaagtggacagaatacctgtttggtagaagggcagcaggaccagctgtatttgataggtgcactgtgtcataaatttgcagcaggttataacagatgtaagctctgaagtgaacttggcattccaacatttttgtcagactgtgtcagattttgagctgtgaatagaccatcttaaggtgaattttcaagtcatttaaaggtcttttccatgaggatggcatcaagtttttaaaattgaaaaaaaaaaagtttagtctcccaaagttattttgctttcatttcttaaattatttcttctgtaccttttgaaaaaggtttctgtatttcatataagaggatttgatgtgcatctgttttgttaggtcttgatgggttttgtgtttttacttaaaaaagacttttcctgttcttaagagacccaacattttccttttttttctctggaatcaaatggagtcaccttagatgaccatttaccctctagcagtggtaaacctagtcttttggatacttgaaagaatacccctttatgctggctggagggaggatgaaatttggaaaagactaaattagattcaaacttgttagggtatttagttactaggagcaccagaaaggcttatttataaatcgccataccgtacctaagccgccagggagtgggtcaggctgatgctgctgcacgttttactgccccaggctggggcgtcccatggtgcggccgtcggtaacccacaacagggcttgacagtgctgtctcaggaaatgcttccatctgaccagacatctttcgttgaggggcaaaaattagatatgactactgttctctctgatgtggatatggagaatgattgatcatactttacatgatacatagctgtatattaacagttcatcagtaggttgcttctgagccttctcgtttatacactattcgatctgtattgtgatttattatttgtttcattattattgttattaatttattattgaagtttattttaattataatattgtgtaagtctatgttatagtagcatggcatggtggcaccctcctgtatttccagctattcgggaggctgaagtgggaggatcgcttgagcccaggagtttgagtccagcctaggcaatgtatcgagaccctaaaaaaaaaagaaataaaataagtcttttatttataaaataagaaataaaatgttgtctttcctctttatctttgctcccacttggatgattttgtttatgttaaggccattattggggaagatagaggtagctcagcctttgaatcctagttgcagattgaacaccctttgctgttgtcagagacctcacttctcaattattgaaggttacccactccgaattctagcagtcagttgcatacttaattgtacttttaattttttccacattattcctttttttccagcaatattttgctgcctagagtagaaatctttagttgtggctgctaattgtgagaaggaaataatttgtaaatgatgaaaagtaaggtggaagagttgcgattttctctccttcattttagttttagagcagcttcaccattagttgagaggaagacagcccaggcagctggctgctcaagtccccatcgcactctgttgctgattttatgtgggagctaatagttgtggatggtgctttggccacaggaagagagcagaggtgggaaggtagtaagaagtagtgggaccggcagagagaagtggatgctcgctgctcttgggctccccactttgcttttcagcatgtttccctgatgtgagattaaaaagtcagtttcaaaagatgctgttcacggcaagcagccggatctccctggtctctgaaggagttaagtctcactagaagttctagatgttggcttagtttccagtcccaaagtgggagtcaaacaaatggagagggtgtgtgaagaatgattacctaggaaatgtttttaattattttcttttctaaatgtgtaaagctaaaagtagaggacatacacagatatatagagtaatctcaattttcttagcttcttccatttatttaatccctgtgactcttatacactttttaaatccaatgactcttagatttatttgaagggacaaattgatgtaggttgcccatcaagtatttcagcaaatttttaattaagattttagattggatattttactgctaaccaaaagaaatacccaattctaattaagcacagatctttctgataatgaaaggaaaatagtatatctggtaagaaattgaatatcctggctgcagaagtgtggaaactttcataatgagttaatcaaagtcatgggtctaaataatctgtattgcctttttaccttttcatttagttaaatacagctttgaaatatagtatcttgttttaaaatttaaaaggctaaaaataacagaatgcacttttgaatgtgtataacattttaaagaagacatacagcttttataataccaaggtcatgtgaacagttcttaatttttgaaatggaaaaaaatagtgaagatttagagcaaaggttattagagcatatacattcattttgttagcttgagtctgtgttctttggggaggaattttcagtgaattgctttgtttctgcattttggataattataaatttgttcacaaacagggtcctggcactgtgattggctgctggtcccatccatcttcccctaggattaatgtaattggctaagcattgttgtagttgtggctaataatgttcttcagggaaaaagttgaaagataattatgacattgagtatttattgagtggacatcaccacctaggcatgactttgctttggatggcttccagaacgttctgtgtttggtttgtgaacctctaatgagctgaatccagttcatttaatattgctcgtatatttctgcacaggattaaaatgcaggaattcaagtttgtaaattgagttgcccacttaccagctgagtggtaagttgtctttggctcaggggtcacagtttgattcctggctggcgttctgctcctgtgatatgaattttaaatgagtattttgttagaaagaactgcagtgctgatgtgaaatttaacatggagaggagtatcactgtttattttttgtctctgagagtctgaaggaactggccactgactgtgtttgattttagtattaccctggtgatctttgatttgtatggtgataattttgtttttgagatatactcgtgactggatctttgaagcatgacgtgataatagtacatcattttagtctttattaactggaactagatttgtggtctttcacttgccagttctcccacatcatcaggcaaatacatggctaaacagattagttttgcacggtgccctaaaaactagtctacttgggtttttgttgagttcaggggggaaatgaattttctatgcctctgtggagaatattctgcctccaggcttctggaattcagacctggggttggttaacagaagtacattggttgatttcatctattagacagctacacagaagaggcataatttttaaggttactagaatctgactctgagtttttcagattaaaaaaaaaacaaaccttaaagacaccaagatattctttgctggatcaggaatgcaggttttgtttcatttttcttatccttcgtgatcataaatgtacacctaggcctttaccaacttgttttaaataagattttaatataaaacggcacccaggagaaatagcttacagaagctgagttatttatttgtgtcaagcagatttcaattatgtagactgagatttttcctgagtttttttttgtaattgggttgatattttaactattcttgcaggtgtttgataatatgatgcctgttggaattataaaacagggcaaaaggaaaaaaagcaaaatgagagattgaagttcatgagtgcttttatgatgggaaaacatgacttttttagtttttaaaggcatacatgtattgcgaagaactttatagcaggaacatagaatatgatcattgttttgaaatagaaaatggcaaaattaaatataaactaattatttttgttaaggtgattcatctgaacttattacttcatattgaagtaaaaacaattcaaaacaggtttccttgaagagggcttgaaaaagatttgtattctaattttgctgcatgttttttgagtaaaatatttatttcagaacataagcattttatttggtaccctcttaacagccaaaacacttcttccaatgcaaatgtttattttggcagcagatgtttctaaaaaggagacaaacattacaattgtttggctaaaataaatgtttcctttggggttattaaggcagccaggcaatttctagggtttccacctgtgttaatttatattgttgatctattctggaaaaaaatgtgtttcttttaaatgtaattaaagccacgttttgatatagtttgcatgagagctctgaaaagtaaggatgaatggggagaggaagactggtttaagacttaaaaattccagagtttttcatcatgaaatgtttattatgattcaatctttgaatcctaaatatgaatccaatagtcagggcttaatttttgttttatttaaaaaagagcctagacttcctatgtttgcgactgtgatggtgtgtccaggatgagaaaggatagataacttgactaagtataatggagaggaatgggtgcctggtgcctgttttacattcagactcttaattttttgagtctctatatttacttaaagatgcccattcatatctgtgtgcacatgtacgctcccacatgtgtgtaaaaaacagaacattcatgtgacaatggcattcttgtgtaatgaaacgtgtatatgtatattaatttatatgttaaacatatttgtagatatacatatataaacacacaaatgaaatgaaggtgaacattttggccagtaaaataatgaaatgctatgaaatttcactatgttgtttacagcattttcatacattcgtgttctgtactgagacttggagccgagctgatttgcttgtacacctgaaatgtttggaggcccttcagcagattgcagatttttataaataatggcctttcgttggccacattttgtcatggtttcctcagttgttcttcagcagtgaacatgaaggtatttaaggtttaccagcaaaatacatttatacctcacatttctgcttccaagtagatagcagatgctactggctgtgatgccaaagctccctgtagatggagttttgtactaagaaaatatttttgggccgggcgcggtggctcacgcctgtaatcccagcacttggggaggctgaggtgggcggatcacgaggtcaggagatagatagagaccatcctgactaacacagtgaaaccttgtctctactaaaaaaatacaaaaaaattagccggcgtggtggcgggcgcctgtagtcccagctcctcgggaagctgaggcaggagtatggtgtgaacccgggaggcggagcttgcagtgagccgagatcttgccactgcactccagcctgggtgacagagggagactctgtcacaaaaaaaaaaaaaaaaagaaaatatttttgaaaagatttgtaaattcctataatacctaactggttttgtgtactttttatattgtatttgggtttaaacatatttgaattgtgacattcttggaatgatatgttagaagagatcatattttaagttaaataaagatttttaaatctttagcctttttccgaaaagtgagagaagatcagattttacctgaaagtttaatgagaaaatgtgagatgatttcattttaatatggaaagctgcttttatattaggatgtttatattgatacatttattttttatctgtacatttacattattctcgattttctaagcttatatacagtatatagcgcctagtactctgctggtagtttatactgttttgtcatgtacacatgagttccactatgtattttacatatagactttcaacctaaaatatctgtaaggttttctattttacttttgagatgtaaatcttaaatgtatgttttatttttattttttagagacaaggtcttgctctgttgcccgggctggagtgcagtggcatgaacatggctcactgcggccttgacctcctgggctcaaacaatcctcccacctcagcctcccaagcagttgggactacagacatgtgccaccatgcccagctaatttttaaatttttttgtagagacgaggtctcaccatgttgcccaggttggtctcgaacaagtgtgtgttttaggtagcactgaatgagtatattttaaataagtgtgatttatttgctttcaccaaagaaacattaagcatggtatttatgttaaaacgttaataattcaaataaaggtaacagtcgacgtcagtaaaatgaaccaaccatatcccttcagcgctccttggaaaacaaacactgaacaacaacggaaatcccacaagataaatggaaagttaaagcgattaagtgacgtatcttagacaagtggttctcaaactttgctgaatgttagagtctcccggggcattaagaaaatccccccacggatgcccaaggatgcccatatcaatgacacctgactgtgaaggccctaatctcccgtgactgccctgtgagtcagggtattagagggaggctacgtgggcaagcgggggcagctcacaccttctggagacttggtagtgatgctggttcttggcccactcggtgaatcagaaactcaccactgacccaaaggaatgaaatgggcccagaaccaggagctgggatggttgagtccttgcctgttaaagtctaatctgtgtgtgatactgggaaaatctggatctcactgtgctcctctgccagatgagggggttggactataagacctctcagcttggatttcccctttaaagtaatattaagtgaatgtcttttcatttcagtattagatttttgtttgtttgtttgacatggggtcctgctgtgtcacccaggatggagtgcagtggcacgatcacggctcactgcagccttgacctcctgggctcaggtgattctctcacctcagcctcctgagtagctgggactacaggtacatgccaccacacccagctaatttttaatatttttgtagagacagggttttgccatgtagcccaggctggttttgaacttcaggactcaagcgatccacttgccttggcctccaaagtgctaggattacaggcatgagccaccatacccagcctcagcattagattttaaagtcttgttatttcagcagtcttgtgaaatgtatgggttgatgcttgacaaattgtattaagataactactgacccacattctttttaaaagagaaagaggtgtttctttcttcttcaaagattagcaaattgttggtatcagtctaataaattattttctaattcttaattttattgttttttaaatgaatgtattctcatgtaagtctttgttctgcaagaacctggtatgtgttagatgtgtagagtgcagtctgtcctttttgataagtagaaaatcttaaggttgacattcttggaatcacaaaaggaagcaaagagagatctagcaattactcatttttaagacattgctactttctaagtagttctgaaaacaagtatatattgaacaacattgggacagattatataaagtgaagtccggatggaaacacgtttcaagatttatgttctgtgcattaccttaactctttaactctcatgaggtaggctagatggctttgtttttgtattttaaaaaggttttttttctaaaggtaaaaagtttttcttttatgttaatagccagccaatagttaaattcttaatggcaaaaaattctttatggcagtttgattatttttacatgtaataaatttattaaagctatttgcccttattataattttgaaaaggaactttaaaagttaaatctgtagttgtgaatgaaattaagaaaactcttaagctgagagggtgcagaggaagaagatgggtgggagcatgtgaggcaagtaggggattataaagaagcagcagctttataatctggctctcctccgcagagccagagagccttgcttaatccaggcttcctcaggcctcgagagcaactctgcagttggactcaagtttagaaatgtttgggacgtcctggatttgagatctgaatgtgggtagtgtgcgtgtataacacaaacatcccttgcctgcttaaatagccccaatccaaaattttggtcactagataaacagcaggagttacccagcttcccaattcttatggagaagtgtgtttaatttagaaagcagaccatattccaaagaatgagccaaattcatctccctttattgatattgacttggtaagagcatgcttattttattttattttattttttttaaataactaccaagcaaaccaaccagtagaattggctcttcagggttagtcaaaggcaaggatccaagtcaagatctataaaacaccaaacattcagaaacaaagtcagactaatgttaatagcaaaaatacgcaggtattagaattaaaatgcaaaaacctgtcattgctgaggtaattaagttttacttaatggtcctgagacatggtataaccagcctcacttggatagttgtagtagctagtcctcaagagagctggagacaaacgtcttttggaagaaagcttcagtctgagatgcaccacagaaaagacagctgtgcagggatggttttccagcctgagctgccaacgatagcgagagcgtacctgaaagcaagagctcttaaaacgctctaagtcaccgaagcctgtcggtgggaatgggaggatgggggagggatagcattaggagaaatacctaatgtaaatgatgagttgatgggtgcagcaaaccaacatggcacatgtatacctatgtaacaaacctgcatgttgtacacaggtaccctagaacttaaagtataataataataataataataataataataaacaaaaaaaaccgctctaagtaaggattagatgtttctttataatcagtatcataatcattgtttccaaagagaactgggaaaaggtaaagcccagaataattattggcctatgggatctgtgacctcagatactctcttaaaagggtcagccaacaaggaggcttccctttttttcaattagtatattaccttgagatttccagtaggatcttcaggcatcccaatagtcattttccagacatcttaaggatttacatctctggaggttctcctcagtgtcctgggcttcatggagaaatagggcctgccttcttttcttcctacttgtgggtcctgtgccattcgttaggggtcatggagatgacaaggtcttactcttcagtaattggccaaaatttgatggttagtgtcttagtttcttttctgttgctgtaaaaaaaatcacagactgggtaatttataaagaaaggaaatttatttcttatagttctgaaggctgagaagttcaaaggcatggtgttggcctctggtgagggccttttgctgcttcacaacgtggtggaaggcatcacagggtgagagggtagtagcgtgctggctcagatctctcttcctcttcttataaagccatgagtcccattgtagggaacctcattctgatgaccttatctaattaattcctgaagtccctacctccagtcaacatatgaatttggagattaaattttcaacacatgaaatttaggggatacattcaaatcactgagcagttggggagaggaggaaagactagaatccccttcagctgccaggaagagctaatctctttctcccctagtgtctctggctgagttctcacccattcttcttcctccttggcgtcaaaataaaaggatgggaagagtgataacttagtcacatcactggcccttagtcttcatggcatctgatgtatcacagcacacttccaggaatggcggttaaggggtgcttcactgcacatacgcagcaggccgtgagagtgataagcacacagtggagagtgagacatgaggctccaggagggattccagctctgaccaggaaatcaccactgctgctgaaagccaccaaggtctggcaaggagcatcatgcagtgtgcttacttccaaatcaaactctgctatgatctaacaaagaatttaagtcacgtgaatgcacgcaggctgcaagagaggctgcgaatttgagttcggatttctaaatttcggaggcagaactttgtggttgttaactctttgtagggaacacagaattgttctcgacagttccaaagtttttcttgtgtagaaatttccctcttcagtgtcgcctcctgtagttttcctgtctcaatacctggtagcttcttccttcccaccgtctgggccacaacccctcctctgtttctcagcctttaaatctttttcttggcttttctcagcctttttcatctgttctgacctttgcgtttccttttcctcctgctgggaagtcttgcagggcttgctatctgagttccttgagacatttctctgacttaagtaaaattgcacactcccactgcctcctgccctgttctgttttctccagctctcttatcccctcctgaacctcacttgtctgatcctcccgttagaacatatggcctaggccggcagggactgttttccacgggtgtggacccatcatctagagccgtacatggcatttcacaaacatttccaaactactaatgaagaagttgccgaatcctagactctggccagtgaaatctgtccagcttgatgcaaaaatgtctgtgtgctttagccgtgttatctgccacccatggttcgctccgagattaggctcattctccaaagctttcatagttttcactagaatcccggtgcccaggtgctctgagaacaaagcctgcagacagctatggggctgtgtttttaatgctgcttttagattcctaaggaagttttgatgcctgagagattgttctagctgagtggttttctgtcttgctgtcttgctgtgtcatgtccggggtctgtgtttcttcctctctgattctaaccccattgagtaaattggagatggctgctactctgctctaaggcccattatgtctcagaatgatcccttgcactgggtgtaatacctcggtctggagaaggttgagttggatttggtgtacctgtgatgggagctaggttcttcatcccaacaccagtcattcaacagtgcttactgaagaaagtccccaagtagttaggatgccgtacatacaaaacagatgtttttctgttagggatttgctgctggagggaagagagttctaccacatgtggtggaagaacagggcctggaagatgggctttgagcctctgtagtgagagcacagttcacatccatgtttgtgctgggatcacggaaagggcttttgatggcattttagttctctgtcgctgatcatttggacccagacttgattttcacagtgctttatgggggctgctgccattatgcatacactgcatcgtagcccatttccaaagcagaggtcatggctacggctggaatgagagttgcacctcggagtagaggaatgaaatttaggttgaattcttaaaaatcatccctgtgtgctttattctagttgagaatctttgatagacatataattttgatgatgatgatgacaggaatctagtgccttcatgtaaactgtcaccatcacaattgtctcctctctggacccaatttcttatttgtaaatatgagaagttgcctctggatgacagtaacaataacagcaatctctgtgccaggtcttatgctaagtacttttacatggatgttctcctttaatccctgccatgtttctatttatctccattttatgaatagtaatagtagctcatgtttattgagggcttactctgggtcaggcacttacttgttttgcttgttttatatggattaactcacccagtcctcataacagcctctgagacaggcattgttatatagtcatcctcattttacaaatgaggaggctaaggggaggggttactcaggctgttcaaatttacatgcctactaagtgctataacaagcatttcagttccttagcgcctgaactctgggcgcacgctagcactgttttatgattctggtaaagctggaatccttgtaactgacactggagttcctttgagtttttaaataataagactgattataattaaagtagcctcattttgacattgaatattcgtttcacgtaaagtcttttgtgacctttaacaatttgaaaattgaatgttacctactacgtctatcacacttagaggaatttttttgaggggaaattcacataacataaaattaaccacttaaaaatgtacagttcaataatgtttactgcagtaatagtgttgtacaaccacctcctctgtctagttccaacattttcaccacccccagatgagacccctggattcattacgtagttactctctgttgtccctcttccccccaggcaactgctaacctgccttctaccgctggatttacctgtttttgatgcttcatgtaaatagaatgatataatatgtgaccttttgtgtctggcttttttcagttagcatactgttttcaaggttcatctcttgtggcacgttccagcacttcattcctttctatggcttaataatctgttggatatatgcatcacattttgtttatccattcatccattgatagacatttgggttgtttccaccttttagcaattgtaaatagtgctgttatgaacatttgtgtacaggtatttgtttgaatacttactttcaattattttgagtatatacctaggagtagaattgctggatcatgtggtaattctatatgttaactttttaaggaagtgccaaaccattttccatagtggctgtaccattttacactagaaacaggattttatcattggtctgttatttactgagactcttaagtgccagggaatcttgccaaacccttttcatatatcatttcctataattctcgccaaatccatgaggtaagtaatactactcactttgccagtggggaaacagaggttaggtagcttgcccaagctgatacaaactctaagtagagaattctgcctttctattagatagtagccttaaagatcctccagaccagccttgctgtgtgtgcaacacattccactggtgttaggcaaggtcattttgggtggcacatagacacagcattacataacctggagttctagagtagggtagttgttctctcattggtgttagtacgcggtagcacccttccaacacttcatagtgcctcccaccccatttcctttttctgaagaacaggcctgtgtctataccttgggcagcatcaatatctggttagaatgtaaccattattgtattgtcttcatggtattcattttttctggtaatcttctgtttatgacgagtagtattattttatatatatggtagtatgcaaagttttaaaatacaatttttaaattaaaaagtgtttcactggaaagaaaaacagttcatgctgtaagttaagcttacttactttgagtttaactcagcacatgtattttcaatgtctacagttgttcagtcctgtactagtcatggggaaataccaagacagccgtaactggggctttgctccagaggaccacggcagggacactctgcaaagagatatgctgagtagtgcgcacaggtagggatgtttaccctggggctatggtaacaccgaggggcacacctgggctgggataaggacaggaatgtagggggggtgttaggctgtatatgtgaatccagactgattctaataataatatgtatttactaaattttaaaaattgatattttgcagttagataaatgccattatctcatgtgtccattgctatccatagctattgttttggtcgaataaattgagagaatattattaaggtctttgacagtttgctcacttagttgtcatcagatgtttactggtagccctaagtgggtgaactcaaagtacatcatgggagcagacacgtaccaggtacttggatgcagtgtgaggagtgctgggtcaagatctatggactatactctgggaacacctgaagctgcatggggtggggaataggtgcccctagacctggatcttgctgtaggagtttgctgggtctggggagagaggcatgtgttcttggggagtaggtagagtgtgcttttcaagttcaattagattgtaaaggggtctttgtgaattttacagaatttttcacattttcagtttacacatggttatgagcatagaatcaagctttctccccttcttgcttccaaattttcctttcatctttgttctgctttggtgcttcgatggatcagttcagaaagccacagggctgccgcttacaggctggctggatcttgtttgattttttgttttgttttgtttaagaagagaaactgtttcttcatacttggagcaagcgctcaggcttccagagtgaagaaaattcctaatctgtctgtgtatccagagaggatggaagtgcagtatgtctctaaacattgttttgataagtagactttttaaaattggtatatgatttctattaaccttactttcttctgtatcagagtgcatcatgcaattatagcacctctatggcagttaagtttatatataaagaattaacattttgctttgcagtctacattgctggtgacttttgcctttggaaataggaacttgccaaaaatctaaagtaatgttcaggcaatatactcaacactctgagtgtttgttctggtgtgtttaacctggtgaaggatgatagggaaataagtaaagaagtgaagttttgaataaaaactgactgccttgccctgtatttccttttccctctatcatctttccatattataacttttggttaaatcaactttcagtgtttatgttaatgtaactataaaataactgtctgtagttgagtcatggactgcaagtatatttccttactgtacaactttctgttatccaggagttgataactgcccattattttacgttttaagaaatgtatacatcaccagtttatcctcaagctctgatagaacggtgcacttcctctcaagatggtggaacccattagttacttagactctgagtgaacaatttttcatgttcatggatgaccatcatcttttgaatagccttcccgtgtctggggagatgtccacatgtaaaaagctctgtctccgtaatttaggattcggaactcaaattcacagcctctcttcagccggggatgcattcaggtggcttaagttcttttaattagaccagccatactggacttttatttggaagtaagcactttgcatgttgttctttaaattttgtgtggctttcagcagcagtggtgatctcctggtcagagctggaatccctccgggagccacctgccgcattctgcattctgtactttattaccctcctggcccgctgcgcattcggagtaaagcatcccttaactgccattcttgaaattactttgacctcaaaccctgttttctgaattccatgtcttgtctttatgtaatcctcgttttagtagggttcatcctgtagtagctttgtaggaagggtgcaggagatgtgcgtgtctctgcttgtcagaaaggtggccttaatgggtggattggctgagtgtagaattctagattggatataattttccctcaaaaactgttgttcccccactgtcctctgagcttctagcatgtctgttgagaagtccagggccccttctttggtatgtcactgattgtttttctctctggagactttagaaacttgatctccttgatttctaaaatgtggatgaactttggagttggtattttccatccattttgctagactcattcagtattaaacttggtgctatttttttcttcgttaggggagggtattattcctttgataattaccatatctttatttcatttgttcttactatctatgaaccttattagttgggtgttataagtcctggattaattctttaatttttgaaactttttttctatcctcctttcatctgattgctttttttgttgtagttcctggcagatgtttgttctgtttttgtagtttcactttccatgaacttgttttgttcaccaaatttttcttttttataccatcttactcttatttcgtggctacaatggtttatcttgccgacgacaatgttgggattctttttgaagggctcctctgcagtgttcctggtccatatttcctttcagcccttcacctatacggtctttctggttggaggctattttttttgtttgtttgtttgtttgtttttgagacagagtctcactctgtcacccaggctgcagtacagtggcacaatctccgctcactgcaacctccgcctcctgggttcaagtgattcttctgcctcagcctcctgagtagctgggactacaggtgtgcaccaccacacctggctaatattttttttttttttgtatttttagtggagacggggtttcaccatgttggccaggctggtctcaaactcctgacctcgtgaaccacccgcctcggcctcccaaagtgctgggattacaggctgagccaccgcgcctggccagaggccttcttgaggtgtctggtggtccttcgctttctgcacatctgtaacagccagttctgagaaccgatcggcacgttgtgtgtgtggacggggctgcggtggtggggagaggattgggccatcttgttggcagaccctaacatgctgctatctccccctccccagtaactaactcatcgttgactctcagaggagaagtcagggtgtctggagagctggaggctgactgggggacgggcctgttacgtgttttaactgagtccccgttttccatggactcgcctgctgtggcccctccagatggcaagtcctcttgacttcctacaggacaggtggggattgggaagggggatctctgaattgctccctacagattgtttacccagccccccgccaccctctgattcctgtctttggggttctgcactttaattagcttgcttcttatcctgtcacctagaacagattaaaactttaattatcacttgtctttctgcttttctccttccaaaatttttttgacctttcttatctgttaccatctcacctcatgttttctttgcccttgtggtatttgtttttatttctttactgtcattttaatggggtcccatggaagagtagagagaaacatgagcatttaatctgtctgtttaccagaaacctctgcaaaggcatctttaataagcagtttttttttttaaaccaacctgttttctaataggttttaatactgtgctatctggtaatgtgccagagttttcagtgtctcaaggaattggtagactaagaataaacctaagaataaatgaattaaacagcacaactggagcgtctctggcagggaacctggcctgaggaggccatgtaagggtggggtggcctttgtttagattcgccaggaaaagcttcagggaactcaggaagtgctgctcaggggaaagggtctcccagctgtgtttaggacccagcgaatgggagatctgaagtgggaaggccggccaggctctcccaccatccagaggcaaaatgaggtctgggtctgtagagaacatccccagtgaagggtaagagaggagagtccagctgagatagacgatgggaaggaaagagagttttggaggtttcttgcagatgagagcagatatattttaatgaggatgaagatgatcctagtgttgtaaatgttaaggatatcttgaatgtgtttacatttggtagttattaacacacgtctgcaggtaaacatgatttttctggttatcctttgcctttaggagagaaaaagaggcaagttaagtaaagtattttaaggttatatttagttcgaaaagaaatttctgactgtagacccggctctctgcagatgtggcttgctctccaggagtcacagaacccaactcgacctcctccctggaagcccaccagagaatccaataaataaaacagtcagagcaagggtgttgtaattgagaccccacctacctggccttccccttgccctgtcactggacaggtgatactaagcattcatatttagaatcgtgatggagactttgccagtcttcagtcctcaaggaaagatgcagtggtgctcatttaaggcagaaaatataactaatgtctgtgtttcagtgtaatttttaacaataaagaatgaaacgggaagaaatttccgattaatacttatgaacccagaaaatgaagttagtcattgtagcataatccttagctcctcagccttcagttgtactgttgctgtatttgagctttattgaagagaacagcttcacagtatctgtatgtgtggcccagtgccaagaccagtgtgaaactaaaaacaacaacagcaaactgttagagtaattataacaaaagtcaagtctgtagccttatgtgtcaggaataaagaataagagttcagtttatttggccagtgtttggtgttcacattgctgtttatgtaactctacatatggtctttcaaagtgatcgtgcacttccaaaatgaagtatctacccacttttatcagctttcccaaatgttatcttttaatgtcttcatcacgattagaacacccattagtaattaggataactcaggaaaaggatcttccatgtggaccaccatcctggctggaggttgttattcttctctgtgcatttttggtgccctggatttggcctgatcctcaggcccctttaagttaaaaatacccggtgtgtggtctgccagctggcccaaggccaggctttttatagccttgtctggcctgggaatggagcttagcatgaggggaggtgccggggggccttctctggcttggtagaccagaagtgtggggaggccctgctgcctcgctaagtcttagctctgtcatcataaataaaagacgagtcatctgatggcagtccctttcttctctgatatcttttggtaaaatatttgttacaataaccaaggagacaactttgagtaaatttcccattatttttgaagcctgttgccccttctgccagggagaaacttcaccgcctgggtccatatactttcactaattaactgagcaccaggttcctggagaaacatatttattaaatgtcaaaaatttggggacatttagtcttcatttttggtcttctgtgtccagtggcatttttcctaaattatgtccagcatttccttgagattatgtatgctattttttattctaaattgttgcctcgattcttctgaaggtactcatgtgttaccagggttcttccctctcctcccctgggagtacttagaaaaccatttttgtctcccttccttcatgccctcttccctggaagagttttatatactaaatcatagggttaaagtaataaatgccattgataccttgctttgttttgttattaaacattggtaaggaatttggtaaagtgagggataatgttacagaattgtcattacaaataattttcaggctataccccacagtcagccaacatgtgggacccgctgctaagacttaaaatattaaatagcagaatgttaattaattcatagagagaagcatctgcatttacgtagtctaaaagagtcaaaatttaaacacctctttgtgtaaatcgttacagtctttgcatgtttttctgtcccagagagcagacaatcacattcattttctccttcttttcttgttcattactagatggaaggggcaaaagaagaaaaagacaaatatttgggtgcttttctgtgctggggaggatagcttttttggttttcttttgtttttaaagcccttaaggaccgtagttggtaagccaattgtcacagtttgggtggaccctaaggaggggaagccgtgtcattggccctgacactgattattgaaggacaattgttcactttctctctcggattaaaaatgcatgaaagcacctttttgacaccgggctttctgaaacccagtgctgtctttttttgtaatactcctgtggatgtttttgcacaaagtggcacctgttagagctggaagtgttcttgcacggctgtctttgatctagtagccctggacaactttaagcacatagttactagatgcaggcccgcccagccccgggagagcatatctggcttgcacgtatttaaggtgatgtgcagaagagaactggaccaattgacaggctgcactgtacacaattactgtgtttcccatttgaattatcacttcatttctgaaaatggaaaagatgggacggaatgataggaagttttgagaatgctacaatatatgattaaattggagactctttttgactggacaatatgaatctgtatttttattattgcattttgggtgattttggacgccagtattcttatttaggattgaattctcacatgaaattgtgtaaatatttttctttttgaggacctatttctaaaattaagcggcttttttgaatttgtattttgaattcctaattttgtaggctatgccacttttaagacataagtgcctaaaaggatgaaaagtaatagaaagtagaatggggaagtggaaacactggaatcaccccttgcactgaacgcatagtaatttttaatgatcacagagtggctcttcgttgtaattagtgtaatttctcaaacaagcatttaatgtataggcagtttaagcatttttttctttctgaaaatatgttagactaatattctttcagaatttcttctgggaagaaagaattgtctatttaaattttactaaggttaccttttgaagaccactaacctggttgaagcagttaaacttgctatccgttctttgaaaccacattgagtgagaaaattaaaaaggaaaatggcttaaatattttccccttgacaggagaaatgataagtatttactgtaaagtgtccagataatgtaaaggaatatgaaagacacaaaaattcccccatcatctttccactcacagataacaagtggttgtatgaagggaacgaggtgcttcattaatctttgaaccttgcgtatttgtcccgtatttattaacagcattgggcagtgtttttgaatgttctgtgtggttatattatttattaccgtgggggaatgagccaggtctggctctttgaacactgctaatttacatgaagaaaatgtccccaaggaggagacttaactagggaaagactcagttaccttggcctctctctgtgtgtgccagagcccccctgcaagcactaggggctgcttctagaaaggggacccagatcttaagacttcgaggaggaagataccctatttgttctccaagaccattcagtcgtgaagggttcaacttgttccgggttatttatttagcattctctattttctgctttgcttttgacactccaatgtttaattgtatatttaggaaataacaatgaagagtacgtttttaaaaagaagaatgttttctggaagggatttccccccacttttggacagtgagttagactccttctgaagcctctggatctaggttattacagggtttgtcttcttgaagctggaactgtccaactgttgtgctatttcagacctggcctgtctttcactttcaagctccagaaataatttatagctgtagggtgtcaggagtgggtttgaactgggcctgcccaacgtaacatggaattgtgcacagattgttaaaattactatttctgcattcaaatgactaagtacagtaaactttttactggcacagttaatttatttgaatatttattggtcgagtgcttcacgtagaagactaacataatgaaaaagcccagcacatactcagagctgatttggctttttaaaagattctaggcttgaatatagctagctaaatggtctttagcaaattgactggcagtaaattgatccctgtggactgtggcttgaatcagcctctcattctttaaaggtattatggagatattgttatctcagcgcaaggctggtctagaaaagggatgctttcagtacaaatacttgttacttacatatttccttcctaactgggtaaagttatatttctattctttacctctcgcaagagcatatagggacttcgaatcagaatattttgttcaattgtaatagccttcacaaatttagtttgtttctgtgtttaagtctcttttgacttaaaaaaaaaaatttgaggccgggcgcagtggctcacacctgtaatcctagcacactgggaggccgaggtgggaggattgcctgaggccagaagtttgagaccagcctgggcagcataacgaaacctccctgtacagaaaaaatttttaaaattagcagggcgtggtgatgtgcacctgtagtctcaagcttgagcggttgaagtgggaggaccctttgagctcaggagtttgaggttacagtgagctgtgatgaggcaactgcactccagcctgggcaacagagcaagaagactctgtttccctgtctcttaaaaaaaaaaaaaaattaagagccagtgatttggaccttcattaattcagtgttttcattgacttactcatatgactattccaaccagaaggatgtaatttttccccctctgagcccccaattttaccattagcagatgtttttccaaaactaaccacaaggaagcatgtcaagactaactcagaggattatacagaggattaaactatgatttaattacaacagtgggctctctggctctattaatagctaatgacttgtattatattttcccgtgcctgtgaactctatgctattttagacctttcagatattagcgaccccagctacagctatcttacttactctgaaagtaggagcctctcgtttcatgtttagttttgttttataacttaatatttcttcctccttcacttaattgggagagcaaaaggtttactaaacaaacaggtttgaaaacccaaagcttccctcatgtcttggtgagcttgctgtgaagtggagtagcctgttataatgctgatagggataatggctggaagctttgtgcttccttaaggaatgtgctacatgcatcatttgcacatacagtgatcggtttgactggtggaattactaagaccatggtatagggtggtactttaaaatcttacagtgcttaaggactggattaggaattaggacttaagaattctaggtttaactctgtgctttaaatcttacttaacacattgggattatagtacttaagtatgcctgtattgaaatgtgttgtgagactagatgaaagtctatgtaaaaatgaatttgaaatatttggatatattctttaaaacaatcttattgtgtgtttttattcagagccctagagttgtcctgaggatgagtattttcccaccgcgggcatgaaaatggatcctaatggtagacccagtcctctagggtggtcagtttgaggcccaagcttcctttccagggaggcagtggcttaacctgggtcaccctgtaggagcagtagctggaggctgcaggacaggtgcttttttctcctcccacgtgtgctttttgtggtggaagagggggcaaggtgtagaaatgtctgactctgattcctccatctgccagcacagcttctcttgttctctgtggtctcacctttatggcacagtactctttcctatttgtctttgagctctgaggctcagccctaacctcgaagagatggcttctgcatctgtcagatgggtctcatagtattacctgcctccatacgttttgtttttagttttgttttaagataaggccttgttctgttgcccggactggagtacagtggcacgaccacggctcactgcagcctaggactcctgtgttcaagtgatcctcccacctcagcctcctgaggagctgggaccacaggcatgtaccaccatgctggctaatttcattttttgtggagatggggtctcactatgttgcccagtctggtctcgaactcctgggctccagtgatcccccactttggcttctcacagtgctgggattacaggtatgagccacactgtgcccagccctccataaatttttgtgaggttaaatgaggtgatacttgtaaataatttaatgttttcactcactaaaaaacaaactttttttggtgagaacgttatgaatgttttcataaaacatgtcgttcttcagggagttgtgaattgtgacattaacaatttccttttatcaaccaaagctagctactagtacctgttcctaccccctcctctttctgtttttctggcagggggcactaaggaacgaacggaattgccagggtgagctggaatgagcttgaaaggctgttttccttggttttgagtgattattgacttgtacttggggactttctgtggaattcagaaaattaaggtttcttatgacccataacctgaggcagttcaggaagccctttggggctgtgaagcaggggtaggggcttgtcctggagcagagcacggaagattcaggtgtctgcttggttcctccaggctctgggatgttaagcttattaaatagcctctctagacccagggaacatgttgggtcagctttcaaaattgacaaaattgtctcaggactgaggaagtgtggcctgttccacagtgcttacagcctgctgctgtaaaccgtcgcggtgtgcccccgcacccatcccggccatcctgccacgcggaattgtgtccacctctagataccagctaacactgtgctatttgcttgttgtgtttgaatatatagggcacagatgaaacagtgaaagatttaggaaggttttattgagagttcatttcttttgcaaaaatgttacagcacattaactgctgtaattaccataaataattaaaacaaaaatatgatcataagaataaatgaacaaaatgtgttaagttgtaacatgggcctctgttgattgttctggcctgtttacttccagtcaattactaggcagtttttgtccacttgggctgtttgataaggcttttgtgataaactatgagttcggggcagttggggttgggatgggtgcttatcatatatcatagaaggcatttcatgaagcataaaattcaaattgtaataatgtcactagtgtctaagttaacacgaagagatgaatgaacataggtcagagagatggggaatgatgtccacttttggaagagcaagtttgtaatactattatctaagttattcttaagaattagtaatagatttttaaggcgtatggatgatattatacatttaaagcccattagcgagcacattgttttttgattttcgaaagtttgggaattagtcagaatttacactgagagtagacttcagctacaaaaatattgtgtgcaagtgtaccttctgcacagggttccggtgtgtctgaggaaggcgtgtgctaacacagacgcgtgggatgctgacccacaaaacactgcaggcccgtccactttgtgtgtttcacgtggcggcagactacacgcttacctttattttcagtttcttttctgacaaaatatcacatatttcagtcagtgtttctgataaagtttgtaaaataatcattttataattatattaagatgaaatactaacaagctaaacaataagttagctatatgaaaactggttaaaataatgaaaccttaagttcatcaaagcagttcatcattttgaatggagccctaaattgtgtgtgtgtttctctgtctttgtgtgtgtgagtgtgcgtgcatgtgagtatctttttaaatgccacaactagagatgggaatatggaattcagtgatttacattggagaaattagctctggaatctaggaaccagatggctactcttagaggatcctcagggatgctatcatacttttatgaaaaagacaattgttgaaataccagtatgagaataaagattatagtggtttgttctctgttatcaaaattttcaggaaaaatgtggttatgtagcctacaattttcacgtattataattataactcttcgtgtggactggttgtagatggagggaagacagcaggctctggagactttctggacccctgcttctttgtagggttgttatgaggacaacatgtgttcctagatattgaggtcttagagcagtgcctggagtgaggtaaacaacataaactgatgtaggttgcctaacgttaactggagcgaacttactgcaggtgccatgtggaaagatgtgtgtatgtttcagcaaatacgttccactataccaatgcctagaaccatgtatgtgtgtgtgtatgtggtgaccatatagcctatgcttttcaggatgcattgaatgataacaacataaacacttaaaacctcccactgtgtgccatgtgctggtttttggcattttatgtacattaactcatcaacttcttaggaattctaagatgtatgtcctattaactcattttacagatgataaaactaaggcatggagagattaagtaacttccccaagtatttctagtggagaagccggggttgcatccagactctgaccttaaccactgctccatgctgcctccctgcatcaagcactgtgtcttattataaaaacacttgtgtatccacatgtgtgtgtctgtatatggcagagcccatttaatacatcctgtgtgtgtgggcatgcatatcctctctctctctctctctctctctctctcacacacacacacacacacacacacacacacacacacacacaaactgatgttggctttctaaaatgcttaagcctagtaaatctcaatgctgaaaaacccattcagtcatattttgttgaaactgtgacaaaatataaggggaagaaatttgggggaaaaactagaaaagtaatacatatctaaactggaccgttgggagcttgacgtgctggcaatctaagggtaggatgggctatctgacctcactcattcaccccaaggctggaagggtccagaagggcttgcagttggatttatgggagccgcatggaggagctgggattcaggaaaatttacatgtttgcttgaactgttaaccacaactagaacatcagtgtagtaagatttgtctgtttactgggtgcttttacatcagtaatctcctttgaacctcataatagttctcttaaatgacaccaaaagtattaccattttccagacgaggaaattgaggcttaggttaagtgacattcctaaagttacacagttttgaagtgtcaaaagctgaactttggttttctgataacaaaacaatattctttgattctgtcacccgcaatttcaagagagtgtcagtgccctggtcccctgctttgtggaggctgtacagagcccctgggaagctgaggtgccaggcatacccactgagaatgcaaggacaggtggctgttagaagcagaggccctggtgtgtccttggcctgggggctaacttctagtatggggtttcaagaagccctcttgctcaagtgtgaaggagggctttgttctgaagcttctatttgaattggaaactcagggtgttgttgagctaggaagggggctgaagagccatgaccaaggtgctggccacctactctggaactactttgattttttgtttcagtttggcttaaggaaacaaagaggcaaatagtgttctgttcctaactggtatagtagtcagttttgcattggaaatatacagtcatgttgcttaacaacagagatatgttccgagaaatgtgtcatcagacagtgtagtcattgtgtgaacaccatagagtgtactcacacaaacctagatggtatagcctgctgcacacctaggctatataacagagcctgatgctcctaggctgcaaacctgtgctgcatgtgactgtattgaatactctaggcaactggaacacagtggcaagtgtttgtgcgtcaacatattgaaacatagaaaagatacagtaaaaatacaacttaggtgtccatcagtgggatgaatggataaagaaaatgtggtacacagacagtagaatgttattcagccatagtagagaatgaaatcctgtcatttcgaacaacgtggatgaaactggaggacattatgttacgtgtaataagtcaggcacagagagacaaataatgcatgttctccctcatagatgggagctaaaaaaaaaaagtgaactcatggagctggatagaatgatgattaacagaggctggaaagtgtagtggagagatgggaggggggataaagaggggatggttaataggtacaagtatactgttagaaggaataagatgtagtgtttgatagcacagtagggcaactatagttaacaataatgtaatttcaaaatcactgaaagattggaactggaatgttcctaacacaaagaaatgacaaatgtttgaggtgatggatatattaattaccctgatttgatgattacacattgtatgcttgtatcaaaagatcacaagaggctgggctcggcagctcacacctgtaattctagcactttgggaggccacggtggtcagatcacttgaggtcaggagttcaagacgatcctggccaacatggtgaaaccctgcctctactaaaaagtatacaaaaattagccaggtgtggtggcgtgtgcctgtagttccagctactcaggaggctgaggcaggagaatcgcttggacccagaaggtggtggctggagtgagccaagatcccaccattgcactccagcctgggtaacacagtaagactctgtctcaaaacaaaaacaaaaacaaaaaacaaaccacacataccccatgaatatgtacaactgttacggattcataataattaaaagttaaaaaaaccgtaaaaatggttcacctgtgtagggcacttaactgtgcatggagcttgcaggactggaagttgcgctgagcgagtcagtgagtgagtagagggtgaatgtgaaggcctagggcattactgtacactactgtagacattatcaaccctatacacttagggtacactagattaattttttaaatgattatgctacaatatgatggtgattaccatgtcactgtttgataggaatttttcagtaattgtatgggaccactcttttttattttttgagacagagtcttgcctgtcgcccaggctggagtgcagtggccgcaatttcagctcactgcaacctccgcctcccgggttcacgccattttcctgcctcagcctcccaagtagctggggctacaggtgcccgccaccacgtgtatgggaccaccgttgtatatgtggtccatcatagaccgaaacactgttatgtggtacatgactgtaaatgaatcagaattgtctgatgattccttttctgtcatcccttacactactggtgccagtgccattaggatggctgcccatcgcctgagttttggccataaaggaatggagagcagggagagttcgccttcccttaagagttggcattttttgtttggtgccttacttgatgtttagattttagttctttaaaaaaaaaaattctagtgtttacaggtgtgctgtagtgcacctgtgtaaaggaaacttaaagttgaattattttataatttatacaccagccttttatacagagcaatgcttatggcagcttctctctctgtgttaactggtattaaagcttttctagattaaaagccgtaggttgcaaaacatggttttttgcatgtgcagttatttctttaccactgagttgtccttccaagcctggtctaaatgtgcttgaaaatcaccatctgctccctgcagtttggagagggcacagaaagactaaggtgaaaagctgtcacttctaatgttttcattcagactttcacacccttcttgtctagttacataattgtatgcagcaggagttgtttcaaccatttggtcttgtccttattttgagagagagagagagattaattttaagagagttgggtcacagtactgaggcagatttgagaatctgataaaccatgaaagtgttcagaatggaatcttcctgctcagtcagtttgttagtggataagtccattgcataaatgacatgaatatgaacaaaagcacctatacttatgcatatatctccctttgcagaatatgctttaaattttgcagaatatgcttacaaatttttaatgccgtatgcttagattttactttttgaagtcagtatagcacagagttgatgatataatagtgctttacaattttatttgatgttcagaatttattatagataatatagaggaaggattttgaattgttcacataacttattttttcagtgtcttcttttttttttttcttaaaaattgatctattttggttttgattggaatgaatggccacaataggatttgaaaatgaaacaggacagaagcctgttagtgtaaactggcaataatttctaatagtcaggaacaagaagaccattaaatcgtgggatttatgccattgaaaaggtagtaagataaaataagaatattactatactctagaactgtaaattttgatctttctgcgagttaattatctaacatccataccaagctggagacaatagctgactctttcatttacttggaggtgattgtaggagaagaaaaggatttcagtcttcagttggcaaaatgatggttctaacttgcatgtaatggaatctttagtatacccacaaaagattatttcattaagatgttaataatagatttttgaggaacagcgttttatacttttcataattaggacatagaacttaaaacagaaattcttttttttccccctctacttcttttctagcttgagaaaatctggatctctttagaaaaagcctttggtctatttaagcactctgtttgtgccagagttacttgcttttttgtgcaaccaacattttagaatttctctaatgacacaaaaacttggtttggaaaaagatacacattccaggccctcagagaacaatagcagagccacgtagtaggtctgtcagccaccttgtacactgtggtcgttagtagagccgagacggagaggtactggttgtatgaaaggtagacagaggagcctttgcaggaaggataggtgacatttgaaggtgccagtgaaggaacaacaggactctgtgtgtttggtggtggggaggggggacaggcatgttcttgacaggggaaacagtttatccattgctttataatcctagactggcatggtgtgctgacgaagagtaacctggagaatgtgatagaagtctgggttaagaaactagaccaggccaggcgtggtggttcatgcctctaatcctagcactttgggaggctgatgccggtgaattgctggacacaggatttcgaggaattcgagagcagcctgggcaacatggcaaaaccctgtctctacaaaaaatacaaaaaaattagccaggcatggtggtgctagcctgtggtctcagctactcgggaggctgaggtaggaggattgcctgaaccctggaggcggaggttgcagtgagctgtgattgtactactgcactcaagcctgggtttcagagtgagaccctgtctcaaaaaataaaaaaataaaaaattaataaataaataagaaaccagaccagagacaggttgtgaatgtgaatggtcttatacaccttcccacggaacctgaactttatcatgctgaaatgggagccctttctctttgcttacaaagctttaataaggaggcagctatgaagtctgtactctagaaggctcattgctggtggtatggaaagtgggctagacagggagcctgaaaggaaggtgagtgacaagggagtgaccctgtagaccttgagatgtgcagaagcagtggggccaaaagggaggtaggactgacccaaagggcatttgtgagtttgaagtcaggcaaaggagggtttctgagatgattttccagtgtgcagcgtgggcatccaagtaggtgtcagtatagagttcaaggaatccaggaggaacaggtctaagggaagacagtgacgttgcttttgaacataatttgatttatggtaggtgtcttgaggaaacagaaatgttcagtggacagctggaaatatgggtcaggggagttgtggatggtgaagagagacatttgaggtttgggtctacagttactgtgtggctcagtggttctgttctgggctttccattggaattggttggggagccttaacaaatagccgtggtgtgccccatcctcagattttactacagttggcctggcgcgggcccttggccctgtgtaagcagggctgagaatcacaattgtaggcctacagtggaagccacaggaagggatgagtgttgttcaaggagagggctgagcacaccttggcaccccagcacttaaggggggtatatggcgaaagagggcacagtgagaaagtaagacgaaggcagaacagtaagagaaaaaaaccagaaaagagctctgtcataaaatggatggatgtgggccattccaaaggaggatgcagtggccagcaccgccatgcactacagaaggtcagggagaaataaggattaagaaatggccagagagccttcctgcagtgattgatggtacaaggcaaagcggagtggtgtaaggagtgaatgaggaaaggaggaggcggtagatgtggacggctctttgggactgcatgtcttgttgtgtgggagccaggagtgcttctctgttaatgaaggcctaccctgtgcccgcttgggggctgggccctggcagcggaaagtcatgtctagatcactcttcctgctcatgaagagacagggaaatagtgaatgacagaacagatgatgagctgagtttcataagatgaataacagtcatttaaaaacaaaaggcaggtgggtagaaagaacagcagaggaggtggagggtggcgtcagtgccttgacggaatatgggcctgcgccttagttgcacgtgagatgatcctggagacagtgccgggtcatggaggatgtgaagattaagttgggaagtttgacttgaccctgtacttcctctccacttctaagaatgcctgaaattagcatgttaggtcactttttaacctgctgcttgtggggataagaaggatttaaagggaaggaacctggaaaccacctgttctgagtctaggcacacaaagaccagaataagatgggacctcagcagattagtatagtggtgggtaatagagatgagaaggaaaggggtggctttaaatctatttagaggactaacgaggcaggacagggaagttgattgcattagggcaagaaggtgtgggatgggtgagcaggagacttggatgactctggattctcaaggttggatggaagagaagaatatggatctctcagccaagagcctgagcatagaaaaagaggccagttttaaagatgatgatgataagtttggttttggatatactgattttgaaatgattgtattggttgtggatacttgaggaaagtagagagtagtttgtatttcttttttcctttaagaatcttaaaacaacatatatatcaaactctcctgtgaaacacaggagagttgtatctctattttatagatggggaacctgaagaaattaaaatgctgactttccaaaagtatgaaataggaagtggaacccaggttagtgaatactccagttctgtgtcttgattaattgagcaattgccaaaactgtgtttttcagctgttggttggatgaaagatgaattcttccctgtatgatgctgcacacagcttctgggcattttggatgggtgctgggcctctttgagtccttggcaaaatccatgtgcaaaattggatgtgtggagtgtggagagggaaggagagattccgttacttcttgggcctcactagttcgaacattccgtttccagacttgcaataccatcatctcaaaattgttctttgaaataactaaacaataattttcaacctataacagatgatttgttttgtatccttttttttcttcaagtagaaaatggaaaaattatgtctgtagaacacagtagactggaaatgacttgtgagaactagttttatattttcttaaaactaatcttctccctcatagcaaagccttatgtacttaaagtaattgaatggactgcagggtatactgggaattgtagttttccacttctttgtattctgaagattaataatcttgcagccctctgagtgggataaggagaggatgctctctgacaaattgttatcttgtctttcagaggtgtgcttcgggcagtgagtataccttccatgtctcccctgggctcttggcttgattctaagtaatggtaatatataggatggctttaaaattgtttttggcttatgatattttactttccactagctatctgtaatcttttcttttagcctagtttttaaaaagttgttatttgtatcaaggttatatgtgtaaatggtttacagagtccatgcttgtgtaagctgtgctgtcagtaacagtaggtactgcccgccttagcccatgcccacgtccccagaggcgtccactttcaacccttgtagctgctctttgaggataccttcatgtctagaatcacattcttacattgctccttgaagttttaggctttgtctgttgctgtccccgctggaagatgatgatttagtactcccttctcacttggccctcaccacaagcatgaccctttatcctctctcatcctcctagtgtagacttgccggaattgtggtttgatcagtctggtatttacattatgaagggtggggaaacactattcagaaatgagccatgtcataaactgttgttttccttttctacacagctctttgtttttcgtaaataattttttttaaattttctatataaacttaccatgcactcccctttagaatctcaatcggttataactgtctgtctctccttgtaagatgtttagatccatcagttatgtcatcagttttatcttctagaggacttcctatcctagagatttctggcttgctccagtctctctggattcactttctgctgatgttcaactattaccctgggattttcctttacttggagtttcccttcactttcttgtgttggatctttggtttcctggattctgtgtctttcttgttttggtggagccaatccttcagtagctttcttaagaatggttcaagagaccaaatttttaagatctcacatgtctgaaaatgtctttaaaataaaagacattttaccctcatgcatgacttatagattgagaatggaattctggaaatcactttccttcacaattctgaagcacttgctcaactgtcttaaccaccagtcttgctgttgtgaagtttgaagccattcttgcttcttgtttcctaatcctttgcatgtgactctcttccctcagcccctaatgttgtaggaccttcttttggtctttagttttgtctcagtccattttagttcatttccccacgtactctggctcaattatggaaaagctcttaagttttttttatctccctgttctccttcatttttactcttctctctttctagaactcatcatctcatactagacttttaactttatctcttcttctatttttcatgtcttttcctttttgttccattttctagaaaagtttttcatttcaattatatttctaatttccaggagctctttctgttcctctaagactgcttccctccttccctccttccctccaccttcctcctttttccttttcttaattcttttttgttttgttgtaaaagactcctgttcttatttgagggtagattattttttcttacctctttgagatactgattgtactctgttttgcatagtttccttgtcgtctaacttgcccttttctgtttgttttggtccctatttttatgttaaagtctttccccaagtaattattggttgcctggccagttgttcatcataagaactactgtggggaccttggtgggctccttagggaaatctgggacattcccactcccatcctggctgtatttagacctttcttattggtccagcctcaggtttaccacagaaagaggtctgttggcaaggttgattgtgctgggggattctgtggatactgctgtggtacttctgcagcagtggttctgaggagcccctcttttgctcttctacgaggaggaaatctctgggcatctgccagggtgaaggaggagctgtgcttagtgggagagtgagtgcttcttagtcaccccatctaccgccacactatactcggaggtgtctgctgccaccaatcgccgagcctttggatggttctgccttgtcagctgggtgtcggacttaacctttccaggttgggtaagttagttactatttgtccatctgtttctagcttccaaaatttttggctgtttttgttcctcttcttgtgggtttgttttataaaaataaacaaaaagcaggcaagcaaaaagcaaacagtactgccatttttattactagatgtgagtgctgaatctgctgtctttatccagagtctctttaggttaaaaatatgtgagtcataaaatgaaaacagtttggtttcgtttacatttgtgggtctgactgctgttgtgtgctactttataaatacctttgtaatttatgttaatatgttcatggctgtgggttactgtctgtctaatacataaacagaattgtcacagacattaaaatgtaattaacagctacaagaactgtctacacgagttcttttgaatggtttatactacttggaaacgttgaaaaactcagttgattttgcaagcatcatggaagttacttcgtttaagtgtgatttagtgcattttattttctgtacagacataggaaagttacttgtgaccacagtttttccctgtacatgaatagctccctttaacatggcctggcacagtgctggcttattataatgctatttgtgtattttccttggagtcttctgtgacctgtctttcagccatccattgcatactctgacagacggttttcatctttgacaaccaacaagaggtgtacacatgacatatctggacctactaaagggtagcaaaggaaatcatattgctggatgttaaaatcaaagttttaaagtggcttgaggctcctccatggaaaagatggtgcaaacaccataggcagttaggtactggcggcagtcctgtgctgggagccctggccagagctgtgtggatggcagcaataagaaccctcactgctgaggacataggaagagccaggctgagtgccggaatccatttccttgggcataaactgagctgggagaaagggatgtttcctcccacaaataatgtgagaggcatgataagtacactgtttcctgtggaaagctgacctagtgattgtattttattgggatatttgatcctttatttgaatgtttttaaaagtatctgggtggtgtcattattaggaataccacctgattaattttttttttcatttggttacatttgaacggtatgtgaatgtactattttgaagttttaaaataactttgaagatacttttggtttcctttaggcctgcttttcaggttaagaataagacagagaatatacttctggtgtgacttttaaaaaatgtcattttaccttagaagtggtccgacagatctcaagctgctcttcacatgccctgccctttaaatctcaggctgttcattggagttcaaaatacagctcctctaccgatcaaataagctttctttaaaaaggcaggtggagaaaacaaatgtttgtttcagaaataattttaatgtccgaaacgagttgctgtattcacgtcagttatgcaccttgtcattgagcatggctgctgcagttccaaactgtcccagtgccttcctgtccctagcgctcttcctcacagtggggattgatggatgggtcatttccatcctacctttctatgaggaaagccttgtagcaggctgccaggtgaatgcttgcctcagtaccgagctgtgcacaaacgtctgattcattattttggatcagttttccacgtggtctttattttgtatttgttgaactatttaggtaaagtgtgaattataaaagaagctcaatcattcttcttcctccctggaaagagaattgaggaattggtgtttccttggttgtcatcactgatatatgtgggtgcttctattgtattgttatcacatgaggataaatattaaggatttaaacctcctgtgataaagaaatggctttagaagacagaaatgctgaaagggtttatcttagtctgttcaggctgctataacaaaaataccataaactgggtggcttataaaaagcagaaatgtatttctcacagtttttgaggctggaagtttgggatcaagatgcttggcagattgagtgtctggcgagggcctgtttcctggttccgggactgtgccattgggctgtgtcctcctatggtggaagggggtggccagctgactgttcttcctaagggcttcagtaccattcatgagggctgtgccctcatgacctagtcacctcccgaaggccccaccttttaatgccatcacctggagggtttagatttcaacatatgaattttggagggacacaaatgttcagaccatagcagatttaagacaatacaaaacaaaacaataggtattcttgtgaaactacttagaactgttttaaatgttttttagaaataggatttagagacaatttttgtcaatttttaataacacttaacggtactttgttttgctaatgtgaaagaagaattcagcaagatcattacaatataaaagaagtgacagaccaagtacgaatagggtttatttgggtatgtaattttaagtgagtgaaggaagaggcatttgatgatttgtaaaacatttctgatttaaaaaaaaatgaatttgttttttttgcctctaaagcgttaaattttcttggtcatcagttgaaacttttgatttcattttaattgctatattgtatgtgcattgtctgtatatttcttcaaaggaatttaaagatttggaagtctgttaccaagtgtgtgtcagaagaggccaaattttcagatttaatacttttagctgttttttctaatgacacttctttcgaagacgagattaacaaattttttttgtctctctgtcataggtcatcgtgttttttggtatagttcattcatcttctgttgcctcaacatctggccataaaagcgaataatgaatggttttttgaatttgaaatttgcatgtgaatttttggatgagagacatttttatataatttataagtaaccattggggactacatctgcctcataaatattagcaaaatttcacactgagattaatgagcttataagttgttagtctgcatatatttgatttgcctgaaaatagggttttcaggaagtctcagtgacctatattaactactttttataagggcgaggacatggaaagactttattttatcatgcttttcttcacccttttagtagacttgcaggcatgcaagtggaagctacaggaattaatacggatgtcagaaaatatgtgaagagatggatttgtctagagtgagctataaagtgaatttcttcatatcaaattttatatgcccattgagattcttaaggaaaaaaaagagtgagcattcctgtagggaaaaatcggttctgagagcaagtagtaaaatcacacttaacaacttcagacatctgttgaaaatatgtctttaaaaatatttaaaatatcatttccaataatgttctaatcctcatagtagcaggagagagcatttgataattgaggcattactgatctccctgagtgagttccctacacaccagggagcagtggctggggcagggtgggggcggggagggcaagcagttgagaggctgttctctgcctttgccagggagtagccattccgatggtccggtttgttcaggacttgctctcttccttccagttctagctccgaaacaccctggattacagtctttgaagaagtaggagagccggtggccgaagtgcccactcatgacctggccttgctagtggaggtggcaaccagagaagctggagagcgcctcctgatccacagggaacttcagtaaatccttttgcctccccccggtcgtcagattgcgttcatactgtggtagcaggccccgtctgaggcccatcctggtgttgagaggctggatgctagcagggagctccaggagacgttccgctggctgtttataaccagatcctgaacacaaagcttccagcctggtgctagaggccagggagacctgaaaatgtctcacttcagggcttagggtaacatggaataaatatatttgccattgaacaaattatttaggttaaattgccttcgttgtcttttctgtatctatagtttaaaagatttcctatgccttgggagctgcggattgaagagcttgctttgaatgaagtcttgtcaaatactgagtctgtgtggtaacttagacctggtgggaaaatgtggattctggatttcctgtgaaaatagaagtacttgaaaagcaatgcttaaaatggtagtgttaaaaaaaaaaaaagtcacatatatccagctaagagttgctaattctgtcgtattgcacattatagatatgtttacatttttaaaaagctgtgtgacattggactctagactcagaactagaatattttaccaaacctctttgttattttgcagtaatatttagtaatgattctgtatccaaaaatgtcctaataacatctaacaaaccatgttcctaaagtctgtgcatgttttgtatttgggatttttatcattttcaaatatctagaacgtttggatttcctagcattatgcctaaaagagattagtatttatgtcagtaagttccgtaactagaatctgagtgattttttttgccttgtcattaatctgaggaggtttgaaactaagactgctgtcatcgtttctcctttcttgtacagcctatcttgctacggtttcttacatataccatagaagcaacaggccagcctgtggtgtagaaaagtgagatttttggagggcagggatactgtagcttacttatcttttacatttatcacctcctagctagtacagtgcctggcatccagtaggtgatggacaaataaatggaaggcagtcatggaatgctaagtgcaccccatggaatgttcttgttcacttatgctatgggcagtctgaaaaacggtgctagacagagtggaaatcagatcccatggataacccttttgcacatttgatagggagtggtggagaaggcctgatacagatggggacctgaggttttcttggagtgattaagttgctcaaggtcacctaattaataagccacagggccaagatgggaatcctggactgactccaacactgttgctcctaattactgttttatcctacttttaggactctggagatgccacatggaaagaaacattctggttggcaagtatcttcttacatgctcttacttgctccaagtctttgggacagcatatgacagtgggggcagctggcacatctgtgttgttcccctcctgcaggaacaggggcttcttagatgggaggctgagggcccatccctgtgcaggtgcatgtcctgcttgatgataccaggtccttccagggcctcctgggactgggctcattgtaagttacaagagcattcacttctggttttccttcttgaggaaccacattgtgcttttttcctggtggcttatgtatacttaattgaagacttgtttttctctttctgtttttctccatgttcttagatttaaaaaatagtaaatgagttaatgaatgaatatgtgcatatatgatattgtacgctgacatattgttgggaagttggaatagagtctgtgtagaataaaataaaatagactggatttaagcaacagccgcttctcaaggcgagtgatcctgagcaagttacttaaatcgtctgaactacaatttcttttttattaaacaagaattgggattagtcgatgagatttcatgtgtaaaagcaggttgcctaggacctggcacttagtgctcaataaatctccttcctccatttcatctgtttttggaatcatacctggtcagtttaatccattgtttttgtttgtttgttttttgagaaggagttttgctgtttttgcccaggctggagtgcaatggtgcgatcttggctcactgcgagctccgtctcccaggttcaagtgattctcctgcctcagcctgtcgagtagctaggattacaggcgcgcaccaccacgcccagttaattttgtatttttagtagagatggggtttcgtcatgttggccaggctggtgttgaactcctgacctcaggtgatccgcgcgcctcagcctcccaaagtgctgagccacctcccaaggtgcgagccaccactcctggcctaacccatcggttttcagtctgtttggtttattggcttgctaagctttctttaataatttctattcagtaggacagagccttccagggaccagaaaaaggggaaataggtatctgagaaataacaaggtctcttcagcacccttttccaactgctgcccccacgctgtggagtggatgttgttcgtgagcctgctggcgtggtcattggtcatccttccacataggttgtttcttggtgctttgttttcctccatgctgtttttcccctggaacccctgcccatcggcccatccgtattttatgctggacactcccctcctgctctgaggctactccgtgtgctgaagacccctctactcttccttccatcttgtgccagccattcttaccagaactgtcggacagcgaggcagtgaccacctgaacaggccatttcatgtttctttctttcccttccagcctacaagcacgccagcagccccgtgcatggcttctcatgtctgctcctggcaccttgcatgatgcctgacagataaacagaaggctcttagagaatacgggttgaagaaaaggggaatgggcacaaattttcatatcatatttaattacataaattaatcacaggttagtttatgtaattatgtgattaatgattggaaagttctggattagcccactggatagaattttctgtcacaataattgtgttcaactgaagattctgacatttcataagttcaaagtgaataatttttatcatactttgaggagagggtaactaatactagtcttttattactttaaacttaaagcatatttagtcacaaatatttttgtaaactttgtaaaaattagtggtcaatttttgaaggagagaactggtgatttacaggataagtggaaatctgaataaatattactgaagatctggaatctacaaatgatctgcgttgatgcagttgtgtttctatggttggctgcgtgcagagctgtgatacacagtgtgaattattcagcaaatgcaatggagtcttgtgcagcagagctttactgcagtacctgtgtgctttgcagattctccttcacttacgtgggtttgccttcttgtctcctgaaggatggcccggtcttccccacctgtggacagtctcaggcattggtaacttcaggcgtctgatgagtggcgtcctttagaaggctctctcctggatctgtgcccccagcccaacctgtctctcagctgcgggccagccttgtcagcacccgccaaagcatttctcagatacccacggcctcctcagaaacagctcttcctccatctgctttgcccacatcttctcttaatggaaccatagtatcctcaggcctgtggtggcagtgccaaagagtcatattggattttgcccttttttcctgtactgactaatttcttatgtttaggttttttgtttgtttgttttattttgtttaaacagggtctcactctgtcaccaggctggagtgtagtgtttcacggctcactgcagcctcaacctcctgggctcattcctgcctcagcctttcaggtagctgggacaatagatgtgcgccaccacacctggctaatttttaaatttttggtagagacaggatctacctgtgttacccaggctgctgtcaaactcctggtaggctcaagctatccagccacttcagcctctcaaagtgctgggattacaggtgtgagccactgcgctcagccatttagtttgttttaatatcctggagtaggggccctgactctcctgattccccttctcactgactatcagctgtatgctgtgggaatctctcacctgtagagtgaagttggtaagagtgagttcaacaccaaggctcaaggcctggcatgcatggtgtttgttacacatttcccccaaactaaaaatcagcaggtgcatctgcagtccccttttcagtgtggcctctcttttgcatgggtcctctctgtgctggctccaggcccgtccctttctgactatgtccttcattcctcttacacaaaccccgccttcttaaataggtcccacattttcatggtgccattatttgtgacttggaagtcctgatctctttccctgtatctctgtctggtacaaccctggctactcctcaaaactccattccattctccttcgtggagctttaatccatttccagaacgtgcgtagtgccttaagcgtatctctttatggtcgtggcatattgaatcttgacttatggtaattggaatatgggtcctttgctcctttaaggcccttaagagcaggagccacatctggattttatcgctgtggcacaaagtggaatagcccacccatagtaactgatcaggtaaatatttgactttagttaacatataggatctacttttacttgctaaattttacagtattctttgaaagaccatctctaaatggcctatttgagtatatagattaagagtagtgtctagatatatatttgaggctgatggccattcatttattcattgttcccgcattccttcactaaacgagcactacaccatcacactgccatatgttgtgtagcaggaactcagtgtatggaaggaaagtcattctttagcttcataggaaatggttgtggttgtgcattgcatgatcaactttcagagctttacaaatcactcatttgagtaccataagctttcttcatatctgcatccattttccagtccagttagtgacatctatattttcttccttaaaaatgtatggaacactttgccatttattcaaaattaattgcatttgtaatggtcaatgttaaaagccaggtgaggtgagaaagttttcattgaccagctgtattcgattctggattaatgtttttgattatttttatttcacactctagattttagcatgagactgatagaaccttaaaattatcacagtctttctccctgccagcttctcctcacaaaataaagatgcgagtctctgttcagatttaaacagttcatgccttttcagtgagctgctgtttaaaatgagttcctcaggaaagaagtggcaaagaaagctgcgcgtattaagtatgttttctttgtcttaataaaaggatggcttactgccgtgttgtgctgttgtttaatattatagaggttttactgcaactctcttggtgattacaagagggctacgttttggctaacaaatgtagtaaatgtgatgaaaatcccctgtgttgtacatttctttgaataacatgtttatataacgtgctaaatacttctgttaaagaactgctttcctgaaattgcaaattccattccagattttagtgttactgaagtgtactgttgaatattccaaattatatgggtatttttaaagcatctttaaaatttgtctgcatacactgtcctttttgaagttgggtctctgaaaaaatttagagttgtatctctggatgatagtgttgactttcccgtggtacctaccaggcactgaacagaattatttaaagaaatttgccaaagctttatattttggagtagatagcactgatgtgactgtgtgaataaatcacatgcacagattaataagtttgtattaatgtttgtaagatgatattgtggtggtgttctcagtgaactgtgggcctctttcctcagcctcacccatccggccctgtggattttaggttgagtcctgggtttgccttgtggacttgggcctcgatatctgtgtaggctcagctgtctcgtcctggttccagtggctctaccctggaccacggcccactcagcccgagactcactgctgatgccggctgggcatgtccacctgggggcgcctccagcatcccagttccgagtatactcatggtgtttcttttccccagtccaccgtttgcccccataaaaacatggcactgctcaatctcttaagttgcccgcctgggaagttattatccttggtgtttttccctcactaccctcctccacttgatcactaattcctgaagactgtcccagacactttctgtgtgccccgtcttcatagcctttacccaagttgaggctgttgccgtcactggcgtgggcagttgctttagcccctcaaccagtgtatctgccagttatcgccctcctacttccagatcattctcactctgaggtccacagacccctgagtgttcacagatggacctcaggatgctgcgaatcctttggaattaaatattaattttttttgttgttgttgtttgtttgtttttgagatggagtcttgctttgttgccaggctggagtgcagtggcgtgatctcggctcactgcaacctctgcctcgcaggttcaagcgattctcctgcctcagcctcccggaaattaaatattaagatttctatatatgtgtgtagatgcatttttctggccaatatactctcaaaggttctatgaatcccgaatgtttagcaaccacttattatttattctttcacaaagagctttcacagtaatcttgttaaaataaaatgaaaatctgatatgttattctcctgcttaaagttctttagtgaatatctgttgtgaaataaaatccaaacttgtgagtctgatggcatgacccttctggactcctgtcttcctgttcacccctattgctctcagctctccagcctggatctaagcaccactttactgagatgcttgcagttcgagattgcatggtgctgtgtttcactctgcactgtgctgtactgttgcctgtggacccgcactccttcccctctcctgtttccttcaggtgtctctttctccgtgcttcttccttgcctgctggctccacctacatttattcaacgtctacttcaataacgtgtctccctatattaaaattacctgtagctattgaatgtgtcccctgctgaacttgtgaccctcatgagtattttcagagtctggcacataaggtctcaatgaatgctaaaagaaggaacacattggagctgccggcctctgaaagttgggtccatgccacctgtaggccttcttgcataaccatatttatcctttttttttttttttaagtgagacagagtctcgctctgtcacccaggctgaagtgcagtggtgccatcttggctcactgcaacctctgctgctcgggttcaagcacttctcgtgccccagcctcctgagtatctgggactacaggcgtgtgcctccatacctagctaatttttttttttgtatttttagtagagacacggttttgccatgttggccaggctggtctcgaactcctgaccacaagtaatccacctgcctcagcctcccaaagtgttgggattacaggcgtgaaccaccgcgtctggcccatgtttatccttgacttttgattagttacgtaagatcttttgaagggcttctctcactctacatacttgatcaggcggttgcccttcctcatgcctctgccagctgggcgtcacgttctgccttctgtttttgctttgtggtgccacacattttgaggctctcctttagtttctccacttatctggctaccatttcaaggtaccattttaccttgtgtcagcgaggattcttaggtgtaagcgatgaagaccgagtctagccaattcaagcagaaaaggaattgacaggctgttgggaagctcacagaattgccagaagggcaggaacaagggagaccacaccatgaggatgctgcaaaaacaggtcacaagtacagagaagacctgagcatgccagacacaacttgtacctccatatcgccccactggcatcctggtggcagacacatgtgcacacacctgaaattgggtattgctgtgtgtactgcaaggagaagttcctcctctccttgtttctttgtattactggctaatgagtcaaagaccagggcatgtgcatctgattggctgggtcaataatctagctgcctgtaactccagttactctagtttctagtttgggaaagcaagtaagtgtttggcctttccagcctctcttttgggaagtggagtctgcctcctatcaggctcataataaggtgaggagttacccaaatcccagaagagggttcatagcttgggcagccaaatggttggacaggtggtcgctacattgctgctttaatgcttgcaattgcactgggcttgctttaggaagtgtttgttggtaagagaattgtcatcatcatgggtttgtttgcatcgtgattgaccatttaggaagtgtttttgcatcagcatttcattgagtgaggtggaggaagtattgtagtgccattttgtaaggaggaggtaaggaaactgctggacaaagaggtaaagcagtctgatgtaggtaggacagttagctgttgagggcggaactacagcttctgactccagtgcccatggaggctctcctccgcaccagcctatcccggctgtgccctgtgcattgctgcaaggggccagggaggagtgttcgcatcatacccacgcactcggagcctcttccaaaggactgagatgtgtactagggtatctggttctgcgagggctaatttggcattttgtattcttgttctgtctacttgtgttgtttaatgttgaacatctctctggttgactgaagccatatgtcattcaaatggaacctgtgctttggcgttggcctgacaatcactcagctgtggagtacagcaataaaaattaggaaaactgtatctgttcattagaccagtggaatttacaatcacttttgtggctgtgccccacagctctacactctggcaaatgagagtatcgtaaattaagcctttgcccttttttccctctgtgaattgcatatttgtttcacactcgcaaattgctgtagaagccagatagatgagcactttaaaagattacaacaatggaaaatgtgttttgggaatgaagtgcctcaaaacaagtactgtaagaggtattctttttcatataatgctaaacacttctgcaaacccttaagaattttattttagaagtatcgggtagcttttctgttacaggaagcagagggtttatatcattgtttttgtaaagtcaactcttgctgggagttaagatataaacatatgacacatgtgtatatatgtgcagcgtgcgcatatgtgtgtgtgtaagcttagccttcctgtgttttagactagtgatctttcacatacagcaggaaagctaagagtcaactcattcatgatattgggagaaaagcaaagcaaaaactgcaacaaaatctcaaaccctttctgcagcagcagatggcaaacagtgatcagaggagaaggacccttccagcattagaagatttccaaaggctgttccagtaggggctgtgggcttctgggagcccagatgccccctgatggtatatttgagttgtgaggtggaggccaggtggcaagagactgcaggccaatgtcaatgaaaagcctgggaggaaaaagagatttctgggagagggagacatcttagtgtgagcaaatgaccagtcgtttagtagagcgggtcaaaggaaaagaaggatgtgataagagagagaagggaggagctagaaaatggaatgctggtagtgaaaggagagagaaagaaaaatagcgagaatgtttcatgattgtgttagaggcaaaagcttactacaaggcatttctaagatagtagataagatgatgtagtgtttaaagtgtcaaacttaaggctctttatagagtaggaaacagttatttagatttattgtgtaagttttgcataagacaaatgcacatcagccaggcacagtggctcacgcctgtaatcccagcactttgggaggccgaggctggcagattagctgaggtcaaggagttcgagaacagcctggacaacatggcgaaaccccgtctctactaaaaatacaaagattagctgggcgtggtggcgcatgcctgtaatcccagctacttgggaggctgaggcaagagtttcagttgaaccccgggaggcggaggtttcagtgagccaagatcgtgcaactgcactccagcctgggccacggagcgagactctgtctcaaaaaaaaaaaaaaaaaaaaaaaaagaaaagaaaagaaaaacacacattgatggcttttggtggatgttagttattaagcttttagtatttttaaaaatccttgttagttttgtatagcgaacagaaattttaaattgaaaactgcatagtcattttttcgtgtttcttgtgtaatccatgttctcagactagcataatttataagcacttttgtggctgtaaagtagagaaaaaggctaaagagaagggtttagaattctgtactggtcttgttagcttgatagtagaggttagaagggtatttaaaatgcactgacagtgacagcgtgttgcctggggcctgcaggagtttcgagagagccctgccaggtgagttggctcaagttaggtcttctccttctccctgggtggggcctgcatggctgggaacagcctctctgggagccactcttggaacctgagaaagctgatttctgttaattacggctcactcaggcagtcacaatttggtactaggagagccagaagttgcttttctggacccaaatagggtttagtatatggtatttgaaattttagatgtaccagatttgaaattctggcatgttgtatttgaagaaattgcataatttctactagtttttgttttcaaagctttggaaaatagactcctgcttatactgttttaaaaatatatgtatgtatacaatgtatgcacacatctatgtatatatatagtgtcacatgtaatacctttaggttctctctaaatgtctgcacaaatggcatattgtcttcggttttgcatcattccttctcagagcctgaggactgcacgggttcccatacctcaatactgggctactttcaacacctgtggttggaattttagtctttagtgatacatactggtggatctccagtgttcctgtccccattgtggggaagtagttatagcaataattccaaatggtagatattccttaaaaattgcctcacggtttggggctacagtattcgatttggggtggcggcaagtttaacttcctccccatggcttatttgggttaataaggcgaagatgtgttcttgactaatgtgaggaggcatcctgaaggctagtgtagcattgggggaagccctaatgcttaagtatgcacagttgatatttgagaactagaactcatttacttgggtagtaacatacatacttctgctttaaaataaaatgtactaatttatttcagagtcaagcaatcatacagccagtatttttttaagcatctgctgtatgcctagcatggccctgggaattaataaaattctgccccatcactgctcatcctgtcctgaatgattcctctttcacttgtgtgtgcctttcttccccagctgggttgcagctgttcaacagatcttactctcgtttctcttctctgctagttgaaagggagtcctccctctcagccttggtcccggtggagcagcaattcccatgttctgggacccatttccgcccagctcctcgggcagagttggccagcctgcctctctgctgtgcttctttgatgccactcagaatctccctgtttgcccatgggctccctctcttctgctaggggctgtttctgttcagagattctgtcttattcatatttgtaccatctacagggcctgggatgattctgtggacacctaatcattgcacaataaagtatcagtcaacacatgtgaataatggaaaatatagaggtgtttgaaatccatttgggaaaacaaagcgtagctacagataccaactataagggtgccttgccttgcctttttctttcattgctgtggtctctttcaatcaggagaccagaaatatagcacggttcccatcacacactggccacatactcttagacatttttctgtgaaaggatactgattctatactttttcgtaggattgttatggaggtaaatgagatcgtctgtgtgaaaatagtttaaaacgtttaaaagtgctttgtataacgtcttgctattgtcgtgagtgctagttttgggtgagggaaggtgatatcagtgacaacattttataatgaggtctgttcggtagttattttgtaaatcattttgtagtacacagagctgattagctttatactgtatttttgtggctaggggcttttatgttgaggcctcaggatagagaacaaagtaaggttatgataaaatcttacacggggaacccgaaaagagggagagttcgctgtcttaatttctgcattttctaagggtagagcctgaattaacgcaactgccttaggtttcttctggcctccctgggagttatagtcaaggagtgtttgtgaggcgcctttaggctccccataccgacagcatcttacttcggggctctctccctgcatcaaatcttcctcgtcagcttgcagattctcaattatatgttaaccgtctttattcttggtagcattattgtaaatttggggtagtagttataatttcttctaattgtttctcccagagctattgtttgcctaatattcatataaacctggcaaagagttcattgctagggggattcccaagttactccagggacttggtgatctgagagctcccacagttggggtcctccactctggacaaatagattgccttgtcttcgtgacaatttacttttcttctttggggatctgtgtggaaagttaaaataagtcatagcccttcctctccttgcttttctttacttttctgagctttacttccttctcctctggacgtgctgcctctgaacgccatgtcttccatgctttcctctccagcgtgagcctgacacacatcagccccagcactcggcccacgctccccacagcatgatctcactctccgatcctcacctcgggactgtcacctcgtctcactccagccccatctcttcacctttccttgctttgactcttgacttcttctgagagttgccggctcctctgagtggcaggtgctggaggtgctggaggtaagctgttacctgttctgctggtgtttgccttcctcctgtgcaggtgtttcctgttaacctgccctggcagttcagcctactcagaccagcagtaagttctctttctctggcaatggcattttgtatcaacaacagctgtaggtcagggaagaggcatttcaggagccagaatcgcgggaccctcatttattctgataaagtatcacttggaactgttttctttgagattctctgggaaaaaaaatatcgtgccctaatgcagtgttttctaaactgctgattatgactcattaatgggagcaagaaagtaatgtattagactgcaactagaaatgtttttaatggaaggaatttgatgtaaatagtagaagatacaaatgtagcacatacagcaagtgtcctctgtgttcaaggttttgacataaaatatgtttcttcctccgagttggcgtcaaaacatttgacagccattactctaattaactttcagtattttttaagctcctttgattcccctctccctttttccttctaatgataatttaagaattttttttttttttgtagttcagataaagtagatttagaacatggtctattttcaggacaacctgatgaaaaactgaaaccatagctaagtgatttgccagttgcacggcaggtcttctctatttcatgcaggtctttgcctcctaagcagtgcgccttcccagtaaagctccagcagataagggtaaggtggccacctggagggccttctgtagatgggcgttccatctgggaggattaggaggtgtaaggatggagtgcccaaactccagcagttggtttttcctggatgctgtgtgtgggctaatcatagtccgctaaggaggtggctgccatgtttctaggattattaggctaccactagtttggggagtgaagagcaatggaaaaaggttctgagattcaggaaccaccgaatgcccagatactagtgttgctaattcttttttctggcagtaagaaatagctgtaggttttaaatgattgtgagtgattattgaatgtagtagccctggtcagaaaatattatcatttccccccagttccttataccttgtcttgagctcggggaagtccttccggactacagtgttgctgctgggataaagtttcattgttcttgtaagaaacatttttgaaaggaaactaaatatgtcaaatgaatagttggaaatcgtgtttccctatgacatatacagtgtatcttttaaatttaaaggatttattaaagtgaaaatcattgtaggatactgtttgaaacctggctttaccttctaatggtaatatagctaaaataaagtaaaattggaatatgatctaatttcagaactaaaatattttagcccagttatccttatatgtcactggattttggagggttctgtcttaagacaggtatttgtaccagttaatgtccaaaacagtgaaatgcattcactgaagtctattgacttaatttcagaggtgcttagaatggacaatcagaatacatccatgttgaagtattggtttgaggtgggtaagtatcattttatgattatttattgagtttcaaaatgtatagtttagaatgcctaattttaatgatttgtaaatataaaatgaggaggcaatggaaagaagtgagacatttattttgctgaaaattctaccttcagtaagtcctcctccctttcccctgcctgcccttgggtgtctttctgttactgattttaaaatgtcaacatcctatatttttttctgaccaatcttttgggtctacttggtacatgttccacctgatgaaattttaaaagttgcagattgttcttctcaagggaaataactgaattattttctttttgtatgaacatttactttgaaatatgttgatatttcaagtactttgatactttatccaaagcatcacttcttcatattgccacaactttaaaatggagttcctgtttcttgcccagtatcacaagtttatcatgtaagttaagattatgtgctaaacgactcacaacgaagcctccccttcccacttgtgcctagaacttacagtgtctgtgttggtagaaattttgtatcctaatattgtacaggttgagtatccctcatctgaaaatccaaaattagaaatgtgccaaaatcctaaactttttttgagtactgatgtgatgctcagaggagatgcttattggagcatccaagattttggatttttgggttagggatgctcaaccagcaattatgtaatgcagatatctcaaagtttgaaaaagcttgaaatccaagacacttctgatcccaagcatttcagataagggacattctacccatactttctaaattaatctcaactacacagattttacaattttagtgttgctgttattgtttgtttgttttgaattttgttcttgtcgcccaggctggagtgcaatggtgtgatctcagctcactgcaacctccgcctcctgggtttaagcgattctcttgcctcagcctctggagtagctgggattccaggcacctgccaccatgcctggctaacaattttagtttttaaaacttaaagaaatgtgtgtgcatttctcatttacaggcttccttcctctattcagcttcttttcccacccctgctggctctcttgtatcctctgggctccccatgccttaccccgtactgctctcctgggacacagcatgacctccaaagtgtccttgcctctcttgtcccagtctgagtggctgttcgcttcctccacctttcacttccgtttaatgactgagcctcgtgggagagtggagtgagcacttccgtttgtgactactgggtgaaattatgcaggtttcctagcccttgaccgtaacaaggacagagttgaaccagtggccattcaaagtcttttccagttccggaagtgtatgataaagtagttcttaataatgtgtaactgtgccgagccttccaaggaggaagggaatggatacatattttttcatttaaaacaatagctcattgatccagcaatatgtggactgtgtactggatatatttttgagcatctcctcttcccttccctttacaccaactcaaactatgatccagggaacaagctgcaaggagttagtttttgaaccactgataatgcttttgtgttccactgaccctacctttgtacatggaattcaggggaggaatcattgctttgtgaaatggtgggctggtggtagcagcatcttcgaatgtagaaagatttatttatttataaacccactcctcatttgttatgagaacattctgaaactcaggaaggcgacagaagactcatgctcatttgaagcctgtcctgtcctaggtaatagggacaaaacccccagcctcttcactgtctgtgtcagtgtgcagcctcctctcgggagagcagtgggtgccagtaacgtaccaatgctggctcttcccacgggactgtctgttcatggattctgcagttgacacgattcccaaagtctcagaggaagaaatttaagagccaagttgggtcttggacagtctgtggagaagttggacccttgcatgattaccattgctattacttttctccattgctatgtttttcaccatatacatcatttaaatttaggggtagatagattaatgagtacattttctccctgaaaagtatcttcatggaacacttagactgtatctttttaaaggatgatgctttaaattaatgcagtttttgaaattttcatttttgatgggcttggcattttcttctgttttcatcagcttagttacaaaaatcattttgaggagggccagaagagaaaaaggatataggaaggctgtggagcacccaccctcctgcaccctcagagagtgggcttttgactcgtggtaacaatgcaaccgcataatctcacctcacccccaattctttcatttgaaaaaaaaagaagaaacaatttcaaaggctgtatttaaaacctacacacgaatgagtaatttatatgcatttatcatgcaagtatacgatccccagggtggaaagtggcctgcagtgaatggtctcgctcctcctgttcccctacaaggctccccttccaaattggaagataccagttgcttgtctttttgttgactcttttaaaattctagtcctcttctggtaaatcctattttctgtaccctgtccccaccccatagttatctcaaagagaacagtcttttcaatcaagcattcactgcacatgtcccagtcatgcggttacaaagttgacattgcagcctcagcaaaggttatctctttaaaattttctgaaattcccctttggcacattcattttggcagctgggtttatataggaaagtggtaaagctcttggctcctctttttgtgctttataaaaatagaaatctctggccagaagggcagataagcaagaagctcctctgtaattcccatcacttctgcttcccgagtgttttctgttttacactgtagtaaatggtgtcctcaccatgtgcttgtggaccaagtgggtggtttttagaaacacgaacatactgtagcctgacacttattttaaagtcttattagaaaaccctgctgttctaacatgtgtgtgaagtactgttagactgtgttgacttttgattttgtaatccttttgcattaaaaacaatggaaaatctcaaagatgacattcacgaattcaaaattaccagttacagtctgggcaataatataacaagaaagagggaaaatccaaattgctttgtagtgagatgtactcattactaaataaatgataccacgagtgtgcttttcctgggacagcatttttgggatggaaacaaccaaatccccgtgaggcaaggcagctcaggcctttttattttctaggaaagtgttgcttctgtgagcagaattgacccgttcgttactatagattacctcctgagcccttcatttctttccacgtatcctatgaccttcacaggaatagagttttacgaagtcatgttgatgcatttccatagttatgagtctcgcatttaaaaatgactgtatatttggtatggaaaatacttattttttaattttgttttaaatgcaaatattgataccctaggtgtcaaagcttccacattaaaagtgagtgtggctctttttactgttaaaaattttttcctgttttatattattatatcaataaggcacacaaacttataggtgagtttttcactgctgtgacagtttaggaaagaccacattttaaaatgccagctctgttttcttcaagaataggcagtatgaattatttaactcttaggcaaccctcctaccataccaagtttatatacactggaaatatgctattttttaagctattttagaataagatttgtcatcccttgtattaaacaaatgctcttctctcagaagctgcggattttttcctgttgttcttctattttgtcaaaaaacacactgtagactttatagatctgtggtatcgaatactctcgattggatcctcaggaagaaagtgttttaaagtgtgtaattagggcacttgagcataaaactacaattatacacttgcgtgttaattttgtgtacagtaagactttagttcaacactggttgtaaatgagaggaagcatttgactgccagtgaatgcctgcattttatgaatacttgaataaaatctcctctaattggctgacctggaaagaaaggtgaaaacatctgtagttcagtgggagaggagaatacaaaatgtgtactagagatttccttttccaggtacctcgaaaagtgatctcactcttgtgtacagccgtgtttgctgtgccttcgggatcgtttgtgctattctagctgctgtttcacaataaaggcgaacagggtgaaagcagtttagataggcaaaggaaaagaatcaagggacagactggcatggacagtagttggcaaggaatttttgatatggttaaaaaaaaggctttgggctgatataattgacttgcgttggttgactatacatttgttaatcaaattctgtgtacaagagttaggcaacactccttgaagcctgaaggagttaattttatgaaaactaaaggatgtaccagtttgcaaagtggataataatgtgggagagcttgttaccctaaagagatagcctggactggaaatataaattaatttaagaagtgtataaataaattcatggataatagattcataatggttattaagaggaaataaaggctgttcaggacatatccctgacttctggaaattgaggtcatgagaggcactaccatttagttcccacagctatatagaatattcactccgcagaacattggtctgacctactattcacttcagctgtgatttgctaaatatagagtagttgaacttagaataagcagtgaaattttgtaggcaattaataattgtaaagaaatccaagagggattgtatgtgtatgtctttataatcttatatcgtgtgtacccttctaagttttataaaaaatttgtcacgaaaaagacttgttactgataaaaaatgagaacttttcaatgtttcccaaatcaaaaaaggtaaatctattttatcctatgattttttttaaatttctaagctaatggggagggttaaattatcccagatgtgttggtttcagaaagcctgttaaaaactggcaatgtttatggcccagaagttacctgttaggaaggaaccagggcccaggccagaacatactggacttcagagcaatgtgagagccatggacccagcttgtgggtgtgggtggtcagctagcccattctgcagtgtgggacactgcctgacccttttgtatactttgccaacttctttctcatcccgggtcatctttttcctgttagtcaagagaagccagatagaattggagggaacttagctttagtatacagtgcatacagtaagtgctcaatatacatttgttgactatttctcatttttcaagggtgaaaggtgaatttcaggaaattgtggagtttttgttgttgttgttgttgtttgttttttccttagacaaacctaagaacaagatttatttttcttcttaaaataagaaagaggggaggaaaaggcacctaagctgtttaggagtctcatttgggaacttagcttaagggactgtggaatgttgagcagttgtaagatcttgaccttgtaaactttatttattaccttctagcacattatttttgactggacatgttgacataataaaatttccttgtgcaattggttcaaccacgcatcagcttagcatctgaatttcttgctgtggggaattttcagtctgtctcttatgcatgaaaaatggtgtttgatcttcctgtgaaatcaggagccagcaggatttgccacatgtgaatggagctgttgtggacttaagatttttcttctgctttttgctttcccattttgtagaatttacctggaggggttcaaatctgtgatgaaaaacaaacacataaaaattaaggagctttcttctgtttaagataaattgttatactttttgataactcttagacagcagcagtaaataatcctaaataaatttcattttgttctagattcatgaaaaacagagttggtttaaggagtgattttggtatatattctttgaggctgttaattctttatacctataccacaaacagattctcacattcaaaaataacattatactacatatggttttgtagcctgctatctttaaacctcaactcagtaatatatggacagaactttttgttattaaatatagtgtaaaatgaggattgttatttttaatggctctatagtattttattgaatcctcacctctgctcttttttttccccccctcaaaccagttccctgttgatggacatttaaacatttaggctgtttccctatttttgagtggagcagcaatgaactccttgctacacatatctttgcatacttgtttcataccttttctttttcttttctgtttttttttttttttgagacggagtctcacactttcccccgggctggagtacaatggcgcaatttcggctcactgcagtctctgcctctccggttcaagcgattctcctgcctcactctcctgagtagctgggactacaggtgtgcatcaccacacccagcgaattttcttttttttttttttttctttttttttttgtatttttagtagtgacggggtttcaccatgttggccaggatggtctctatctcttgacctcgtgatccagccacctcggcctcccaaagtgacaggcgtgagccaccacacccggcctcatactttttcttaagataaattcctaaagtagaattttgggttaaaagaacgttgtttctatacatattatgacttgccttacatattttactttgtaaattcaccatgattatttcagtttgccctgttgctctgtaatattttggattatgtaaaatgaaaacataaaaactcactgataagcatctaggatcagtcattaattataaaacaaaatttacatctaggtctaaaggcaagaaagatttaagcataaatgtgttaaaatgtgtgttatagaatgataaaaatggagacgaacagtttagacttctgtattaagtgtatatacatatgccaccaatattttaaagctattatttatatccattaaaatgcctaaatcttaagcatgcaattcagtgagttttgacaattacatacgtctaggataccactatcctaattagactatttccgtcactcctagaaaattccttcatgtctctttccagccaggccccatatcccacaatcattgttatgatttctgtcacaataagttgattttgcctgattttgaatttcatgcaaacagaccatatggtgtgttgagaatgtatacatttaattagttcttttcaaaaaatagttcttgatggatgtgtaaataccaaactgtacttcttaaaacagaaagatccaaagctgatgtgaaaattgtatagaataaaaacaataagtctttcaaaagaataaaattggaccctttgccttagactatatataacaattagctcataatctatcatagacctaagtgtgtaagagcttaaacaaagctataaaactctttttttttcttttttcttcctttttttttttttttgagatggagtcttgccctgtcacccaggctggagtgcagtggtgcaatcttggctcactgcagcctccgcctcctgggttcatgtgattctcctgccttagcctcctgagcagctgggatcacaggcactcatcaccacatctggctgatttttgtattttcaccacattggccaggctggtctcgaactcctgacctcaaatgatccactcgcctcggccgtccgaagtgctgggattacaggtgtgagccactgtacctggctataaaactcttaaaagaaaacagaggaaaagtttggcactgcatttggtaattattccttggatatgacaccaaaagcataggcaacaaaagaaaggacagacaaattggagtacgtcaaagttttaaaaacttttgagcatcaaaggagactatcgagagagtgaaaaggtataacccacagaataggagaaaatatttgcaaatcatatatctgataggggattaatatctatataaaacactcctatcaacagcaaaacaaataacctaattaaaaaaaatggcaaaggacttgaataaacatttttccaaagaagatatatacatggccaataagcacatgaaaaggtactcaacagcactgatcattagagaaatgcaaatttcacaatgagtatgttatcacttcacacccagtattagtacagctgatatttaatattaagaaaaacccagaaaataccaagtgttgtcaaggatatggagaaattggaagcttgcgtcctgttggtgggaatgtgaaatggtgcagccactgtgagaagcagtatgatagttctcaaaaaattaaacatagaattaccatatactccagcagtcccacttctcggaatgtaccccaagacgtaaaagcaacaattcgaccagatatttgtaaacccctattcagagcagcatttttcacaatactcaaaagttggaaacagtcgagtgtttatccatgggtgagtggataaacagttatgctgtatacattccgtggccttaaaacggaatgaaacatgatacacaccacaacatggatgaaccttgaatacgttatgctaactcagacacaaaataagccagacacaaaggaacaaatattgtgtgattctgcctatgtgagatagcaagactaaccaaattcatagagtcagaaagtgtaatggtgcttgccgggggttgggatgggggccggggggttgggatgggggccgggggttgggatggggaacagaatgtggggttgttatttccagggcacagagtttccatttgggatgatgaaatcctataaaaggatggtggtgatggttggccaacagtgtgaatgtacttatgcatcattgaactgtatacttcaaatggttaaaatggtcaattttgtgtatattttagcacaattaaaaaaggtctttagacatggaagataaggagaaaggtgctcattcttttacacagcaaaatagtagcatgttagaattcagtagtggggagttttcaccacacttgaatacgtctctgataagtttaggacaatgccaagtatttcttttgttcatagattcttttcctccaaaaggaggaacaaactgataatgtaagtagattgagctattcagagacaccaggtctgtgatagaaactggggcgtgttttagtatcataacttcaaagctcacatcaaggaggttctaatatctgttccagtgtttttctatgctttcctagagatagaactggactggactatagtttagctcaaggcaagcagctcttaacgtttccattgactgtggtgtgtgatttctatacgtatttcaggaggttcagtcaacagacattcaccgagctcttagtactggacaggcatgtggaatacagtgatgaactgaactagcaagggcctgtcctgtgcagtggactgtccagtggtgtggtggtgttcatggtcaaatgagtttgagaaatcttggatgtaaaggtggacaagtttccaaactttttaaaggatttcacatatcctttaatgtgatgatatggtatgttttctttttatagtatatttgttttttaaacttttttaaattatagaactcatttctgtgtgatattctatagaattagtgtcccttgtaggacccatagggaaattagtgacccttagggaaatgctggcataaagttctgtctgttagaggttcaccaacctacaggacacttgtttcccttgggaggagatcataatgaaggcttcctcctagttctgtcctgaatgccctgatggcttgtgaggagagggacagtcgctcagacaccagaactcagaagagctatggcctggagtgtcctaggtgaaaggcctgggaagtgattggagcacctggtcttgtagtcagggacttggcctttgagctgagtctcttttctcggaaggacacctcctggggtgtcccctcctgccttgtgtgggtgcttgagtttcccagggccacctctttttgggaggatgtggactggggtggaggcaaaatctttatggtaaaagtggaaaattgtgaaataatttagacatatagaaaagtacagaagcaaatataacagacacacttgtgtaattacagatacagtatatacaggtgtatacacacacacacacacacacccacatacacacagtatatataggtataaaaataacatgttaccctatttgcttcacatctttctttttataaaggagcaaagcatggctgaagccacgccccataatccccaattcttttcaatgcacgtttctatacttttgctacatgtgtgtttataaacagtatacactaatatcttacgtattcaaattttatacaaatgatatgatactgcattaactttttgttgctttctttttaaactcaacattgtagtttttagttttgtaccattttgatatgtggcgtcttactccttttttactactgtgtagatttaattgtgtgcctatagcaaagttaacttttcccatttaccttctgtcttagagttagattttgtcctcttctgtcaattgtagtagacaggactgcattgaatatccttcctggaacatgtgtgtttcatggttatatacttaacaaggcgcatggccgggtcatggggtcagtgtacctttaaacctagtaagaaactgctctctaaacttctttaggccaggctcagtagctcatgcctctaatcccaccagtttgggagcccaaggcaggtggatcacctgaggtcaggagttcgagaccagcctgaccaatatgatgaaacccatctctactaaaaatatataaattagctggtcgtggtggcccgctcctgtaatcccagctactcaggaggctgagacaggagaatcacctgaacccaggaggcagaggttacagtgagccgagaccacaccactgcactccagcctgggcaacaagagcaaaactgcgtctcaaaaaaaaaaaaaaaaaaaaaaaagaggacacagtggctcacgcctgtaatctcagcactctgggaggccaaggcaggtggatcacgaggtcaagagatcgataccatcctggcctacatggtgaaaccccgtctctactgaaaatacaaaaattagcctggcgtggtggcatgcacctataatcccagctactcgggaggctgaagcaggagaatcacttgaacctgggaggcggaggttgcagtgagctgagatcgtgccactgcactccagcctgacgacagagcgagactccacctcaaacaaaacaaaaacaaacttctttagaaggaaaaagggggagagggtaacctttgatcatttcactcattttggaggatgagcaaaaagttcagggtatggtgaaatgaaaaatgagtcctgaccctgcatatttaacgtgatacagaaatgtgaaaggtagtacttgcgttctttattgggataattttctaaaataaatatgtaagtgaatcatttttagctataaattttttgttgttgtgtgtgttcatgtcttaaaggtcttctttatttagaaatgagtgaagcaaattcttcttttgctgctgctactgctgctgctgctgctgctgctgctgctgctgcttcttcttcttcttcttcttcttcttcttcttcttcttcttcttcttcttcttattattattattattattattattattattattatttgagacagagtcttgccctgtcgcccatgctggagtgcactggagcgatctcagctcactgtaacctccacctcccaggttcaagcgattttcctgcctcagcctccctagtagctgggattgcaggtgtgtgccaccacgcctggctaatttttgtatttttagtagagacggggttttgtcatgttgcccaggctggtttggaactcctgacctcagttgatctgcctaccttggcctcccaaagtgctgggattataagctttagccactgcacccagccagattcttatttttaaataacaaatggaaatgttctgatctgaggcatttttttttgagatctccatttagttcagttttgcaggttttaaaaaatatatatatatatagttagaactgtgttcgaggcaaagcatgcactggacagtcaggacttccatgggccagcagtttttggccaaggacaccgtgctgctgttagtgtaccattcagtggctgtagatgaagctgaacacgtgtgtcagatttgggtagttcaagagatttccatattataatgtgttccttgattcgttaaaatttttcatataataatagcttgcttaataatcattcaacagtacttatcattcaacagatgtttgttgacgctcagatccttttccaggagcttatattctagtgatgaggacagatagtaaacacgtgaacacgtagttaagtgtttcactacataactaaatcagtctcccctgtgataagatcaggttggtcaaggcacgagaatgaccatggttagggttagactggggagggagggccgcccgagctaccagtgctctatgtctccagctcccagcaactgctgactagcgctcagtaactgttggttgcatgtcacttgcatgcaaccgtctggttatatgagttatcctgcatatggttaagaatgaaacgacttaaaaactctcagcaatcagaatagggtttgcaaagcttgggacagtgaagctcaggtgctttcctcacgcatcggtcctttgggccctccttgtgtgggcagtgtgtgtgggtgtcttggtcctcagcatattagaagcctaactgggttcaggtgggggttgagcttgagcggtgagcagtgccagaatgccctgatggcctgtgaggagagggacagccgcccagacgccagaactcaaaaggagctgtggtctgcagcatccagcagaaggctctggggccttccatgtcctttggggcaggctgttgatttgtgtttcataatactattcagtttcagaagtctgaacagcatatagtagatctttcaaagccttgcatctgaatgcattgacaaaaaaacaataatgatcattaaagaattagattttaagcagggtgcggtgactcacatctgtaatcccagcactttgggaggctgaggtgggcggatcacctgaggtcgggagtttgagaccagcctgaccaacatggagaaaccctgtctctactaaaaacacaaaattagccgggtgtggtggctcatgactgtaatcccagctacttgggaggctgaggcaggagaatcgtttgaacccaggaggtggaggttgtggcgagccaagatcgcgccattgcactccagcttgggcaacaagagcaaaattctgtctcaaacaagcaaacaaagagttagactttagcttcagtcagctgggatattctatcgaggaattggtttttaaaggtaacatttaggaaataattaatattttacagagagcactacaacttctagtttaataagtcataatggcacctgtatagacttgcaggtgggactgggcagggcatctatatgacttaggaaggcagtcctgtttgacagttggagatgtaaggcagagtcatgtgactgaccgtattcacacaactcacgtgcaaagggaattggacttagagtccatgtatttcaaacccaaagattctttgggtaaactagagttgagcaatccgtcccatcatggctcccattgaaggacagctgaccgggtccagttggttggcactgggccccaggtctcagggagagcccctctgtgctgttacaggtttcctcagcccaggcttacagaaggtggggtgccagcaaagttggtcctaaatggatgaatgagccgtgtgtctaaaaggatagcaaattggttttaatcgtgaaggagcatatttgagggcacccaggtctcggtttgctcagtcgtgtaggtggttgctccagtgaagatttcttagctgcgcccacctatcctcctcgccccacaccctgcagccaaacttcctggagctggactaggtagtaaaaaattctagtcagcttgtggctgctctagtgttagtaggttcttgcaatctgtcctgttgttgtgttgcttagaaaacagcgccccctccccaaacaacacttccatattgtgtgtgagggcttctgtaaccagaaagtcaacatattaaagcgcaattcataggggagttgctggctgtgttgactgagctttacagtcattttaacactggcagaagtgttatcctaactgctttaaatcaaactgcaaagatgcttgtgtgaaatatagtattagatatcaaatcaaacatatgggtgttgaacggaaggatgtgtgttgtagtggtatatggtattctagcatgtggagttgtattttatggaaattcgttggcttggcttatggcagggacataacattcattatgagatatcaagctgtaaaataaataaaagcaaaaaattcaactgtgctgttaaatggcttgcaatgcagacttttctgctccaacaacttaggctctgtgtgatgagaggcattgtgagccgttatggtcacatttaatctcatcctctttggtagatcttgaaaataatctggattggattgaaagaaatataggaactttaactttttcattttttccccttttaccccattgtatatgttaggaattactgtgctgatttttcttagaggctaaatgttttactcttttcatcttttaccatttcatctttttcctcattcagtatttctatagtggatttgggttttaagtgtgtatctggcactcattaatttcttaagtgtgtgtgcttatggggctcaagttcttgaagttctccagtggaccatattgtggtatgaaacaaaatgactttgccattcttgtctctagagtgctttttgctgtcctgatatcttgtttttcttttcctttcctgctctctcttgaaattacagaaaaaggcaatagatttctcattaagaaaatattcaaaaatactatccatggtatatttattgcatgaggaaggattttcctgtaaacaatgctttcaggcatttttaggctgatgtaaattagagatggagaagattgattgaggccatttttgtctatacctctggtatttgcactgtagtacaccttgctttacattgttacctgttttatcaactaagaaaatgccatccttagcaaaaatagtaaataaaattgataatttaactggtatatatgtgctgtaaatgccgttggtatattctgactttttcattctgaacttagaaacaaacatacacaagaaagcacccaaaccacaggccttctgtaaagtattagtgagttaatttggactgtttgagttcactttttcactgttgtgtgggaatggatttcatatcatgcttctctttcttagtagaggctattttttagtctcagtatttagcacttcctcccctctccacctttatgatattatcaatagtttctatctgatagaatatgatggtttttaaaggcaaagcagattgccttttgacttcatttatagtatgtgaatagaaagcagcgtgtcgatttgtttaaggaagagaggattagaaatattgagtttagttgcttagcagagaacccccttcatgttgctgaattgaaaccatatttgatttcatttaattgcacattttgactttctcatttgctttgcttgactttttgacagatgccacctcagtatggacagcaaggtgtgagtggttactgccagcagggccaacagccatattacagccagcagccgcagcccccgcacctcccaccccaggcgcagtatctgccgtcccagtcccagcagaggtaccagccgcagcaggtgagcacagtgcactgccccgcagggccctgttttctccaccaaggcagacccggctctgaatcatcttcctgtcctttattaaaaattatgttctggtggaaaaaaaattagttttgagaaaatgcataactgtaacctaatctaactccatctctccctccgtcttttccccttttgagattggagggtgagaagaatgactggtttaatagctgcttgcattactggttagtggcagcagaaagtgtcagtcattgcttgttccctgtcatttgtgttctgaacctttcaagaaagcactctgccactttgttaaggcttattcaggagaaggattttatcaatcatttaatccttctagttggcacgtgcatggtatttttatcttgacctttgttttgttttgttttaatggtaagtgctactttgtgaaaacattgttgcctttgactgtgttattctatttaaactagcttataagtagatattcacttcagttgcagtatattaaaatactaattggaatcatgtactttaaatatatcaagcagtttctagtttaaattagtctcattaaatactcctttaggttactgggttatatatttcagcttacagaatttgtggaaaaatagtatatatgttatttgataaaatgattcagtttccttatgttttagagactgtcactcatgagtgacatgaaaagaagtagtgagtgagggactcttactctgaatccagataaaatgttcgtagcacatccaatcataaacatcaaaatataattttccattttaatacttccttccttctcttttgtgtggtggaggtggcaaagagaaggtgaacacatgtagcatcgactttttcctctttaaaggacttcttttgtggcttgaatagatcgtggatattaagcaaaataaataaatttacggagcttaattttaatcagtttggctggtttcttacatattttcttgggtttgttggagtccctttccgtatgacttactagagaattctaaagagagtttatgatttgaagcaaaacatgttaaaacaacagctaggattcgagacccagtacaatcttgtttttacatacatgtatttaaaagcttgaacccgggaggcggaggttgcagtgagcggagaccacatcactgcactccagccttgcaacagagtgagactctgtctcaaaaaaaaaaaaaaaaaaaaaaaaaaagtaacatctgtggggtttgtagcagtaggaatgtacatcatttcatagttacctggtcaagtcttttattaaagtgtatgaaaattttaaaacactttaatataatttctttttagatgagcaaggctggtatctggagttttgataaagttataacctttttcaaggggctttcagagccttattgaacttatctgtagacacagagtgttttgtcatgtcatcaaaatttaaggagtcaatagataaattatattactcatttgactgtagtgtgctgaaatgaatctctgatcataaaaccgatttgattaatgattctaaatgcctgtcattttcttcaagaccaagctcaaaatttacttcctttaaaaattattcactgatgacttccagcacatggcaattagttatttaatatctttcatatttaaatatttaaagcatactacaagtaaaatcttattttaatgaatattattttaatgtgcttagtttcagtctatcttatgctttgattattgctatcattttattgatttgaatacaataaattatatggtaaatactctataaccatgactttttaaagtaattgtaataatttttgtatattctgaataaaaccaaacattgctcaaaatacattggaaattttttcttgggtttgtactccctagctataaaatgtctgagttatattcattgtggggcagagaggtgaaagttggagacatttgagtggcctaatcagatggtctggtttgacaggaacagtcctggattttagggagttggatgggagatagatttggaaagtttctcaaaaaagtgataacttgcattatagatatatttagcacctccaaaacctaagtaatccccctaaatctatcctgaaacaaagtaaaaattaccattaaagtattatcaaaatcaagctaaatcttaataacactgaattcatatacctttaaaaacttaagaagctcaaccatatttaaccagctagtatttcataacgaccagaacatttctttatgcagtctttccttttgttttcaaatgtggtttatgtaatctcttgcttttgtataaggcaggcagttagcaagtattagtagtacttggtgtcttgttaatgcgattgatacagatggtataattttagggttccatcaagatacctgactttgtgtcttcaatatttttcatatgtttaatgttttaactaatcaatacatttattggtttgaaaaaataaaaagtacaaggaagggattccgagaaaagtctcttcccgtcttagttccctctgcccatgtcaccacccccgttcttgactggataaccatttatagtttattgtatgtttttctagagtttctttatatcaagaagcacaataccatacttttatttttaccctatttttacacaaatgatggtgtatatagtatatactacatgccttcttccatatttttttcctcatccccttcttttactcacttaaatatattttctagagatctttccaaaggagcacatacagcaatccctcattcatttttatagcttcattacattttatggacataccatgatatatttaaccagttctttttgatggacatttagattagttctggttatttgaattgaaacaatgatgccatgctaaactttgtgtatgtgtcataagtgggcagtaatatctgcaggatgaattctggaagccacagtgctgggcaaagggtgtgtgcatctgcattcccagtgggtattgcaggttgtagccaattcacactcccatctgcacgtgagaggactcttcctacatatgtgccagtagcatggctttacaaagcttctggatttttgccaatctggtacagattgagcaccctaaatcccaatgtctgaaatatgaaatgctccaaaatctgaaactttctggatgccaacatgacaccacaagtggaaaattccatatttgacctcatgtgatggatcacagtcagaacacatgtaaaacattgtttcagtcacacaagtattttaaaacattgtataaaattgccttcaggccatatatgtaaggcacgtttgaaacataatgaatttcatgtttagtcttgggttccatctctaagatatctcatttgtgtatatgcaaatatgccaaaatctgaaatacttctttttctaagcatatagttttagtttacatttatcttgttatgagtaatgttgagtgttgtcttgtgtatttaaaggcatttgtgtttcctttttcctgaactataaatttatatatattttgaattttctctcttcagttgttggtctttaaaaattatttttaaaatcctttgtatattagggagactgggcctttgtctgtaatatgagttattaactccagaggactggaatcaatagaatagaataatagaatagaatcaattgtgctcacatatgcacgcacacacacacacacacacacacacacacacagatttattataaggaattggctcatatgcttatggagttttgcatttccgaaacctgcagtatgggctggcaggtggtaagccgatggtctgatgaagtcaaagacagcttgctggagaattccttcttgcttaggtggggctggtcttttgattatagttaggacttcaaactaaatggataaggcccacccacattatggaaaacaatctgttattctcagagtctccgttgaaattgttaattccatttacagtaccttccaagatcacatgtaaaatcaaccattgcagctacctttccctgatgccactaaaatcattaactgaatttccttaggtatatggtgtttggggtcattttgggatttctgttattctccattggctcttctatgaatgcattagtattgtactgtttctctattatcttttagtatctgatggggtagtatatcctcattatccttctttttcagttgttggttttctttttccttttgctattcgtatgtgcttattttttcctataaactttttctttttttatcacgctattttctaagaattttatcttttgttattgttataatgggatcttctgtgaaacagggtacttagaaaagaataaagataagacacacagaagcactttacttgaatagctttttcctttttggagcccactgaccaaagatgagaaatatccctgtaataaaaagatgtgtttgtttagcttaggtggctgcaggccagggaggatgcagtcctgaggagccccaggagcactgtggaaagggggaggtggggctgtagtagggttggggtgtgtgttagatgactcttaagagggagtggcatcatgaggaggggtggtcctcaactggctgctctcaagaagctgggggtacttttgtgattaggtattttaatttttatctaggagacaggaggattgaagtggggcagggttgtcattggtaaagaagcaccagccacctcatgcctgtaatcccagcactttgggaggccgaggtgggtggatcacctgaggtcgggagttcgagaccagcctgaccaacatggagaaaccctgtctctactaaaaatacaaaattagctgggcgtggaggcgcgtctgtaatcccagctactcgggaggctgaggcagaagaatcgcttgaacccgggaggcagaggttgtgaggaactgagatcgtgccattgcactctagcctgggcaacaagagcgaaactccatctccaaaaaaaaaaaaaaaaaaaaaaaaaaaaagcaccagccacttagaaaaagaagcggggatgtttgtcatttttgtcatcagcaagtggccttgggcacctgttgtttcgggcactgttgctgtgctgtagaaaccatgcagtccgctggctcttctgcctggttttccaatgcttgcctttgcccatttccactccaccatccctgcctctcctgcatgggatagctttccatctctccatttgttgaggtacttttcagtttcttttataacattcttcaaaaagagctgctgtattacttttgttaggattattcttacataccttattttttgttgctattgtaaatggtatcctttaaaaaattacattttctcattgttactggtgtatacaaatgtaacagactttgtatattaactttgtgtgtgtgtccagccaccttttaaattcttgctaattctgctaattctagtgatttgtgaagtctcaggttttttaattaaaataatactttaaaaaatcactgccttcctgcttttttgcctttctgcagactggctcccctgtatgcattctttgaaacggctggctgttcctgtgttatccctgattaaatgaaggcttccagcattttgtcatttaatacaatgtttcccctttcttttctttcttttctcttttccctttctttttgtagctgtccactgttgggctaaggaagttcccttcttttctagtttgcgaagagattttttcatgagtggatactgaattttatcttccgtcttttttgaatctattgagatgatcactttgtatgtattgagatgatcactttgtttttacttataatctgtttttgaggtaaattaccttttaagtatcaaatgaaactcacattctataataaacatagcctcatgatatattgtcttttttattcatcactggattcagtttactaacatttgttttaggtttcttgaatcagaaattcatgaattagactgaactgtaattatccttgttaggttttggtatctgtacttttcgagctttgaaaatgaattggaggccaggcgtggtggctcatgcctgtaattctatcactttgggagggcagatcacctgagatcaggagtttgagaccagcctggtcaacatggtgaaatcccatctctactaaaaatgcaaaaaaaaaaaaaaaattagccaggcatgttggcacacatctgttatcccagctacttgggaggctgaggcacgagaattgcttgaacctgggaggcagaggttgtagtgagtcgaggtcgcgccactgcactgcagcctgggcgacagagcaagactgtctcaaaaaaaaaaaaaaaaaaagaattgaagatgagtcccttttttaatttactgaaagaatttgtgttgttatctgttctctgaatgtttagtaaaactgtttataaagctataaagggttgtatagctctttatctttaccttttgtcttacccctgatttttcaacttttttagtagagatgttgaggtcttgctctactgcccaggctggtctctaactcttggcctcaagtgatcctcctaccttggcctcccaaagtgctgggattacaggcatgaactactgtgcccagccatttaaaatttttgatttcatttcttttgtcaatataggcatattcaagttaaaaatttcttcttgtgtgagtattgctatatatatattcctatgtataggaatttgtccatttcatataatttttcaactttattaacataaagttcgtaatagcctttattactttaatctctgtaccatccagagttaaggcattttaattcataatggtttttcttcttttattcttgataaaaccatttccaaagtgacttggtctttattgtctgtattgtgtgtccttgtaaacaaacttaatgaaattcttctctcaccttgattacgtcttgctttctactttattgatgtttattttgctgttcttcccccccgcccccactcaagtgaatgcttactttatttgaacattttttgtttgatgaagctaaatatgagactaaaattttttctcttaagtactgctttggctgaatctttcaacttttgatatgtatcatttttgttctcttttagttctaagaaatttcttgtttttctaaattgcttatttttttttgaagacatttttattgaggcctgggtttgcattctgtttcctcagaaggattgattggtctttgcttttgccaggtgcctatgggtaccagttatcttgaacaatgttttgtgtttgattttgtgaaagttttattacaagaagaatatacagatacacagaatgacataatgagcactcctatgccctcacgtagttttaatattaccaatattttcccatgtctgctgccctgtctcatcttttcctcctcttccgactttcttcaaagtattttaagtcacagatacatttcttctcaaaatcattctgtatgtgtgtataaaacgtaagggcacttctttttttttcttttttctttctcttttttttttttttttttttgagacagagcctcgctctgtcgcccaggctggagtgcagtggtgcaatcttggctcactgcggcatctgcctcctgaattcaagcaattctcctgcctcagccctgtgagtagctgggattacaggcgtgcacctccacacctggctaatttttgtatttttagtagaaacggggtttcaccatgttggccaggctggtcttgaactcctgaccttgtgatccacctgcctcggcctcccagagtgctggaattacaggcgtgagtcaccgcatccggacaagggcgtttcttatataacagcagctctgttaccacatcttattaaattaaatataattccacttgtctacaaacctagccatgttcagatagccccagttgtcttcagaatacccttctgtatcattcgtttcaagcaaaatttaaacaagatttattacattgatttggttctgaagcctttttatctaggacagtttctcctccccaaaatttgtgccttgacctcttgaaaaacctgggtcaactgtcctgtggaatggctttatctgccagttttctcttgatgtggcttaacttgctcatctgtttcctgtacattgcaagttagatccacaggcttgaagataaacattttatttgcagtcgttgaaaatcatgttcccaacatcttaggcctgcccttgttcacaggatgggtctgtgatcctccttttgagcgaagagcctctaggtggttctagcccccacctttcttgtgaccatcagctacagctgaggctgaagagacattgtgatggacagataaagcttccctttgtaccctctccaaattgctcactaactacattggtgagcacaacacatgctggtgaccctaggccactgagtttggggtggttgttacccgtcatttctgactgacttggtctggatgcttcataggcgatgctgtgcgtttattgtatcagattgagcgtaatgtttggttgtcccacaacagtgaagttaagattaattagagggtttaggtgatgatggtctctggggctgttctaaatgaagtatcttcttgaggttttgtagaccacaccattaagtgttaattttgaccagataccctggtgatggttagcttgtggttgctatttcttaaaggagccacttattcctgctacctctgcatatcaagttcaagacaggtatttctcttttctgtttagtggggttgcaagctcttaaatgatgggtatagcccttcttggtccttaatttaactgagaggtgttgtcttgtattttactcccttttggcaggccctggacttcctctccttttccctgttctcgaatagttgtcaaagggaaagttagaatctatagcaaaagttggcttctattgctctcttggtttctctgttctcggtctgctctctgggtgttcttcatgttactcacatttatggcaagtctgggattcatttaaaaaggattagaaaacgcattttatccagtattttgggtttttcaatcaatagctatttagagcatctaatctgccatactgctggaactggtagtttcatgttttctagttgttcctttggtatcctttatacaattggaaaccatacaaatatgtaatgtttatgatagatcatttagaacatacagataataccttctcattgtttgaatcaaacttttctagtgtctcctttattcttttaaaataaagttcttaggtaatatgagctctccccacacaaaattttaaacaaaattagaataaggcactaactatatatggaaaatgaaaagaaagaagtatataataaagtattgtatgcttaattaaacaaatatttaggcatactactttagaagacttgtgaaatagatgcttgatgtatatgtgtgatcactgtgaacttgacagctacaaaatgagattgatataggaatgttgcattggcaactcagatgtctccagcagggttgtcagtggtgatgtcatcttttgaaatgatgagcaactgttggcaaagttctgagcaaaacaaagtataatcttccctcaatatacgtgatggttttgtttctggaaaatttattatgtcataagatgattttaagaacaccttgttcttccttgcaaaatggagttgggttctagactcagctaaataattagtttttttttttttttttttttgctttgtttttaaatatacccaaactttggcacttttgaaagtagtgtcggctgtggcatggtgatcttttccatcagtcactcttacacattgcaggataatctagcattcctaccctatagccactgtttaaatgcatttctgtgtccttgtgacaactaactactccgttgaaattttgtcactacatgtgttatatatgtccttaattttcctgaaattcatatgtaaagtgagttccctatgtataaaatttcaaacatgagtatgattccctgaatgtaatggaaagaggtaggaaaggacagaaagctgcctataacacatttgtgtttctcttaagtaaatgctcaggcacttctccattagaaggcttgtgagagagtcagaggcttgtgcctgggtctgtgggagccatggactccacaggtgcaaacgaggctgctacagatgtgtgggatgaacagctcaaaaccacgagcaggcatagaatccatgggatcaatgaccacacaacagtaattatagaaatgaaagtatagaagaccactttaaataacatgctcacagagttgttagaaaaggtaagttaccccaaagtctggaaatgttataaatttgtaaataaaatacaaatacatagtaaaaactggtaagaaagtaaagatttcttttcttttgctttatttgtattttctaaattatctacataaacatgtaatgcatatataatattcttaaatgttgtgtaaaggattccacgttacccattatacaatgtaaggaattacccattccggtggcagactaggtgctctcaatgtctctattgatcaaaatatctaaaatgctggctcagttcttcaaactaaatgaaacagtgaatcaaacctctttttttttttttttttgtttaactgtttcttatgcccctcctgtcatccctttcttccttacccaactaaaattccaagcccatcattatactcgccctcacgctcctgcatgtactcttaaatactcaccagccccatcttattaaacctatttatgcaagcctgatgaaatccacttttgtgcccactccaggtgagtgggatggggaaagagggagggaagaccctgctatttatttgagttggtgaccactgatgttagatcatccttgccttgtagctttgcatttccctaaggctatttcagatctccctctgtcttcaaacccaaaaggcttaagccctgcccctcactctgagctagtgaggctgcttcctgtttcattgaagaaatcaacacaagcaatcaggagaacttagaggtaccagccagcctgtgtctgcatatcatgtctgccttctgtgatgtacacactctgccagaaatctccttgttcctctggaaggctgctctgtgcccttggtccactcaagttcttggtttttccccacaccatccatttctctgtccttcccattggcatttaaacatgccatcatttctcccaccccaaacaaaacaaaacaaaaacgcctttcttgaccgaaaccacaagcctgtttttctcttttcttgtattccccatttgctggtatcccttgaatttactctgtctaggcttttatttcaactattctattgaaatggctcttttcatactttcttttttttttttttcacttgctttgtaaattgagaggtaaaattgtatgtatttactgtgtacaatgtgatgttttgaagtatatatactacattgtagagtgagtacatctagctaattaacatatacattacctcacatagttaccattttcgtggtaggaacgctttacatccactcaacatttttctttttcttttttttttttttttgagacagagtatcgccctgtcactcaggctggagtgcagtggcgcgatctgggctcactgcaacctctgcctcccgggttcaagcaattctcctgcctcagcctcttgagtagctagaactacaggcacgcgccaccatgcctggcaaatttttttatatttttagtagagacagggtttcaccatattggccaggctggtcttgaactcctgaccttgtgatctgcctgcctcagcctcccaaagttctaggattacaggcatgagccacctcacctggcaacatttttcaagaatacaatatattattaactacagtcaccatgttgtacaacagatctcttgaacttattcttcccatctaactgaaattttgtatctttgatcgacatcttcccaacttccagcccaccccagcccgtggtgcccccatcccactctctactttccaacaaccagcccgccccagcccgtgagccaccatcctactatccacttcccaactcccagcccatgccagcccatggtacccccattccactctccactccccaacaaccagtccatcccagcccgtgaaccaccatcccactctccacttcccaacaaccagccaaccccagcccatgagccaccatcccactcttcacttcccagcaaccagcccatcccagcccccggtgatcccattccactctccactccccaacgaccagcccatcccagcccatggtgcccccattctactctccactccccaactcccagcccttcccagcccgtggtgcccccattccactctctactcccgaactgccagccccaccccagcctgtggtgcccccattccactctccactccccaactcccagcccatggtgccccctttccactctccactcccgaactgccagcgccaccccagcctgtggtgcccccattccactctactccccagctcccagcccttcccagcccgtggtgcccccattccactctccacttctgagattacctttcctagaggccacatttgagtgagatcatgcggtatgaaacagctcttttcaaagcctccagtgttctgttattcagcctgatgggtgatagtcattccttccatccttcgcctgtcattaggattccatgcagctgacggtatcttcctcctcggagcacctgtcttgcttggttcctgggacgccaccctctcctggctctcttcctactttgtggccgctccttgcctttccttgctagattttctttatctttctggcctccaaatactggcccatgaccagggctcagtgttggcccctctttttttgtggctctacccaccttacctgtatgatttcttttactttcaaagctttacgtatctggagacttgtgactttcatatgtacttttgcaacttggatctgtcttgtcctttctacatctatgtatgtccagctcctgcaggtaatcactaatttgaatgcccaacaggctttggaaaatcaacatatccaaagcgggcctctggccacccagccctttatccacaaacctgccctgtctatattttcccccatcccaacaatatgtatgtcaatccatcctttctgaccctttgaaatctttggctcttctctatcaagcccactttttttttctttttttccaaataatgtgtgtggtttcaccttaagaaaataagatttatgagtggaaggactttgttttgtcattatgtccccagcacctaggtcaatgcctgcacaaagtagaaacttagtaaacatggtgaaaattgttgatttaatcattcaaaaaatcttttttatttgctgaaacatagtaaaacatactttacagtgttgaagaaggtaaatgtttactgctgggtatttaaattttgtgatttcttttggaattgcagatagtgctttgtggaatgcttttatagctggttcctttgtgcagtatagatgcatgtatgtgagcaaacaggctttcttctttgatagaattgctgggcaaaagaacaggcacattttaggccaggcgcagtggctcatgcctgtaatcccagccctttgggaagctgaggtgggtggatcacctgaggtcagaagttcgagaccagcctggccaacatggtgaaaccctgtctctactaaaaatataaaaaattagacaggtgtggtcgcgcatgcctgtagtctcagctactcaggaggctgagggaggagaatcgcttgaacccaggaggcagaggtcgcagtgagctgagatcgtgccactgcactgcagcctcggtgacagagcaagactctgtctcaaaaaaaattaaaaaaaaaaaaagcacattttaaagatttggttttgggcgggctcagtggctcatgcctgaaatcccagcactttgggaggcccaggcgggcagatcacttgaggccaggcgttcaagactagcctggccaacatggtgaaaccctgtctctactaaaaatacaaaaattagctagatgtggtggtgcatacctgtagttgcagctacttgggaggctgaggcagggggatcacttgaacctgggaggcagaggttgtaatgagccaagattgcaccactgcactccagtctgggtggacacagcaagactccgtctcaaaaaaaaaaaagccccacctcttttttaaccaaattcctctctagaaggttttttaacaaattacgcgccccacccccccagctcactttcctacattttaatatatattttccagtggttcttattttaagttttatttttagtgaggatttaactgttttctgagcaccgacagaattaaagagccctcacagaatttggaattaggatggatctaggtgatgtgttacaatgatggaacagatcgtggaaattcgattgtatcaggaagaagtacacagttggacattggtaattttttttgatttactgctgacactgcggctccatgaattccacaacttcttgttgtttacatttttgttaccattaccatttcttgtctctgctgctctttttagggggcagaattagaactggagtgagtaggtctggtttattcttcctgttgtagatagaggataactaggacatcagaggttcacactgtgcgttcatcagacatcttatttacccaacactcgtcatttccttcttttaaaaagcatctatttttatggcctttaaaaaaagctatttgaagaagttgcttccattttaaagtatttttacatcctagcttacttcctcagacttcattaaccgagatttaatacttttatatagaaggggaaagctccttcaatgctgtggtttagtttttgttttgttttgctctaacgtttctgcttgccttatgtttccccgttgtcaggtctcgatgcatcacatgcaggtctgcttcccggtcccctcttagcaagctctcatgacctttctctctcctcctagtacctttagactcagaatcgttttccttttacctctgactcctgttctgcttcagacttactctcctaagatactggaagagacctcctttcctgttaaggcacacatttctccaggaaccttcacccatcgtctcctggcagatgttgtgtgttaagtgtcaaggccagtgttccaacaatcaggtaactcaaagagagttgcctggccgcagacagggggctgtctgtcagtaccctttcttgtgaccgaggtcttctgctggtctggaacagttggcatcctcgcacaaccctgtctgttttcatggctttaagggacactgttgtgccctcatagccagaaaaacctttttcttttcttagagaagagttgtagcaagtaaccctatttaagaagtcaccattttttttttagagagtatggatctttttaaaaaaccttagtgtaaagcagcaacataatttcaaacttggcttttatacgtatagtttctcttcaagttgatatagttgtttcggattcttaagagaaataatgggtattatgaaagtgtacttatttacctcagggtctgttggacaagcaaaacataaaccattttatgagcccctttgggcttgggactgttttgcatgtgggaatctagtgttgagtcagacgttgttgctgacctaaaggagcccctagttgaacaggagggttgacggtgccgtgggaggggtgtgtttcaagctgtgattctagtgttgtgaggcttaggagaagatgttgataaaagtgtctcagaggaagtctggaagaatgaggaagactttgctggtgagagaagaagtgatcctgggatagggccagttccttgttagtgaaaatagaggggatgcccattcctgagagatactgaagtagacaatgaggtcagttaacagtcaaggtcatttagatggagcatattaattatggtgggaactggtgatttatattgcctttgcctcagtgattaaaaatgaaatgaggttatttattgttcaatatcatttaaaacagaaaatagtactagtttagcagttaacttctagcagtagatcacttggtagttggaccaagtggaaatctgagtctacttttatgagagtaggtagatgggtgtttaaatgatattttctaaaatatctttcttcagacatctttttggtcagcaatttttaaaagagatgccgtgaactggaagtacttggcacatgggcaatcatttggaaaagaacaaaatagtactggaacatgggggtaaaataggtttcaattttttaacataaaatatccatcataatccacatagtaagcaaaatctttcaaaggagcttaacttagaaaaaatactttttttaaagctaaaaacatagtgaaatatatttttgatttaaagcttgtaacagcatgccactcaagtcattgaaggaacacagaagtcacattagggacagaggctgtgatccattgtggggtaaacagttccttatattgttgttatttatattatgcaaatctgtttcttatatagaaataagaccaaaatttaatttataagccaatcctgcagattttgggggaaaattaaccttacaaggcctgtggaaagccactgaagtgttcatttcacttattttaagattttattataagagcaaaaaaacaaggacatatatagtttgttgccattaattgcttagtttttggatattaacacagtctattaactcagtaaaaaccagaatatagttaatgttattctttgttttaaaggatattattagtgaagacttgggttatgtttgaattttgaatctttttctttcttcttgctacagttgtctcaggctttgaaccattgctgagggagatttccttttaagtttgaagagcttgtaagcatccgaggagacaacttctgggtcacttagtggctgagcaaggcctattcctagactctgattgttgacttggggcttctaaccttgtgttggggccggttttgggagcacagaggtggggttagataggctgcaggagccaccagcctgcctgcgctcgctctggcaggatgactgatgccaggaggatgggaatgaggactagtgaccttcctctctctgttccctttttctcccttgggggaaaaactagtatagtaaaagctcagcactcgttttgaatataggtgtaatttgctgcgttaacagtttcagtttattgtgtgttttggtggcgttattcctgaaagcttcttaaaataaaaaaagtagaaaaaaagacccattgaagaatgaagaaaaataacattttgagaatgttagaatgtcttttggtatgaatttggttttcttaattgctgtagaaatcagggtgaatctgtagttagttgcaactatgtctgcctgggcctttgcttttccttaatagtagcagaagaaagcaagagaaaaatcctcagattttatacacatcacttctagtatcgaagcatttttggcttttaatggaaaactttcagtgtttttttaatatgttttgaagtataattgggaatttaattgcattggatcataatttgataatgctatgtattcattttcatatttaacatatattttaagttttttttttctttctagtaccagaattaaaaccaggaagtgaggaattatatagtaataatattttcaatactaattttagaaaggggatggaaggctcctcctgagaagagtagccaggaagccaggcaggcctggagtgtgtggccagctgtgtcctggtttgaagcatctcagacactgttgggcagctgcttagcccagtttaactgaaatgtggaggagatcacatcagctgggcatgactgtctaccatggaggcaggagaggaaaaccttagattgttgaagatgtatttcttagttgggcgtgttagcggacatctgtagctccagctgctcaggaggctgaggcaggaggatccctgagcccaggagttcaaggctgcagtgagctctgatcgcaccactgcactccagcctgggtcacagagtgagaccttggctctttaaatgaatgaatgaatgatatatttcatcaaaggctaaagaaaaacttcaaacaccttaagaggagggtttagtctaaagagcaattaagcttcacctccttctctgatcctaacactgctataactaactgtaggtgggtgatccctctctcccgccagaggaggatttatggaattgaaccagatgtcttcacgcatgagtggacattgccttgttctctagtttttagtcctagttccccagactcagcagccagtggaagaagaagcctgctcttctaaaccagaaagttgggtagaactggcgctctccgagcaagcctcctcattgcaccccttcacctccctccccttcagctccctgggcctgacagcccatctgtcttcctctctgataccctgctcctgcccccattggtattgagggatgaagttgggaagagaatgcagtgtgcagttaaaagtatcatcgaggctcattatatattcactaattctctttccttgatatttatattctgacacaagggaaattggggaattatttttttcctggattgtttttttgctactctcagctgctttcatttgtctttaacatgctcatttcaatatgttaaactatgaaaaatgaaataaaacataatttatacataaagttctttcttcatcagtttctttgatttttaaaatttttaattagagtaacaagctctatgtatattgtattccagaggaagattatcttcagatgtttgaaatgtagcattatttttagcatttgctaatgtgggcagtggtcacctttttctttttttctgcaaaagaaagaacagaaccagcttaggtcactgattgattttccccaaagtgctaggcttttgggagaggaatgggtttatgtctctttgcattagcctagggagacagaagaagatggtgtcaggaagtcgggcagggaaggccctttggtatgtatacagctgtggttttcttttctttctctttttcttgttcttttcttttcttttttttttttgacagagtttcactctcgttgcccaggctggagggcagtggtgcaatctcagctcaccacaacctccgcctcccaggttcaagtgattctcctgcctcagcctcctgagtagctgagggattacaggcagtaattaattaattaattagcagggggactccaggaccctggaccccactgttttaccagttgccaaatatttggtgtatcttccttgcttgaaagcagtagttctcatgtctgctttccttatggaagagcagtgggggattaacttcaggatgaatatattagtcaccttgcttggaaagttggaggtgttcattttaacataaagtgggatgaatatatagcttgccctccttggaaagttggaggtgtttaacataaagtgactaaagaaataaataaagtgggtaaataaataaattttattttaatttaattttgatgtaattgatgataatttcagatttctggagtcatctttatgttttttcccaaatggaaatttgactgtttaaaaggtaaaaagtcttctacagtaatagcacttgatgggaaaacacacacacacacacacacacacacacacacacacacacacacacaaaatgtaagggaatctctaaaaaattcacattttctgctatttcttggagaagggggatgcctgtggcctgtctactttcgtagaagattggtaaagttgatactaattggatgctaagttctttttagtatattgtttttctgaaagtctgtactcttagagtggggaagagataatttagtagatcaaatgatccattttaacatcttgtaaaaagttcaaaaagtaatacatatttgtaaaaaaaattcagcagaatccttgtgcttcttgcattttgaaagcattattgatacaatgcaaaacaacagaatcttctttatcttttattgtctttggctgtttcttctgtttctctagctttttttttctttttctttccttcagttattttagctttcattccataggcatttcacagagaaatcagacaacttttgagattaaccccctcagcagttttagggatgaattggcaagacaggcttttgaggcaggatctttctggcactttacttcactctctttggcaaaaagaaggtctgtacctctttatccagcacgcgggttcaggagctctgtctcagcaggtcactgtcatgccacttgcaaccccccatggtattcatctaagtgaagagtgtggataataacgtaaggggtcctgtataggttgcccttttttttttttttttggagatggagtcttgctgtgtcgtccaggctggagtgcagtggtgcaatctcagctcactgcaacctttgcctcccaggttcaagcagttctcctgtctcagcctcccaagtagctggggttacaggtgcatgccaccgtgcccagctattttttgtatttttagtagagatggggtttcaccatgttgaacaggctggtctcgaactcctgaccttaagtgatccgcccgcctcggcctcccaaggtgttgggattacagggtgagtcaccatgcctggcctaggtagctctttagactagagttacttaagcagtctgggcttttattgcatgtttaattcagatactaatggcatatttgcaaattcttaagtaatttttatttgtgtttcagttatttagaaaagtattacaatgttgaatgtggttatttgcagctaatctggttcaaaacatctctatgaaattatgatgttttcagttttggtaaatcccattgttgattatctctgttcttaccctttaatctttctggagtctttgagaatctggtaaaagctacagattctcctcccagacaaatacatgcatcacagagttgctgtattctcaggggagtgttcaaagaccttctactccaggtcaagaattcaggccctagatatgagttatggtcccagtgtggggtaggaagaactgatgttgctagtttctgaaggcctcctgtggccctccaggtctgtggctcgtgtgccggaagtagtctgcttcttggttgggagaagaaggggcttgggttcttggagcaagaatcagccttccaagtgtgagatgccagtgcagggccatgtcattgaaaagctgatgatgatcttctcaagttgttgctttaaccacagtaagacaaataagaccatccctggcccaaggaggataggtgaagggtgggtggacaggtatctacctgggaaattagccattgttaatgttacagcaaaatgccctattacagatgctaggtaatggagtaatatccaaaaccccacattgtaggactcacttaattatcataatttaatgaaaatataacactgtatttaatcaacagtcctcgaaatttatagacaaatctgggaaattcagattcctggaccccatcctccggttgggaattgtcagctgtcaggtagggtccagaagtgcctccttatctggtgggtgggagcatcgttaagtgcacacactctagagaaagaatatcttggttcccatcccttctccaccacttgccaactgagtgaccttggcaggttactcaacctaattttcttcataagtaaaatagtacttactttatggggtcagtgtggaaatcaagagtttattgtatgagtaaagcacttaggagagtacctgatagatggtgtgatgtagaattattagcagctgctgttactaccaacactgtcctcagcatcatggccactggataaagttctattagttgattctctttttttttttttttttaaagacagagtcttgccctgttgcccaggctggagtgcagtggtacaatctcggctcactgcatcctctgccttctcccaggttcaagtgattctcatgcctcagcctcccaagtagctggggttacaggtgtgcgccaccatgcccagctaatttttgtagagacaggtttcaccgcgttggccaggctggtcttaaactgatctcaggcgatcttcctgcctcagcctcccaaagtgctgggattacaggcataatctatggtgcccagactgattctcattcttaaatatgcttttaaaaataacaatagctgacatctgtgaacatttaaatggcaccaggcacagtgctaattgcttgaaggcagtgtgtcatgatcatgaatacaaccttagaaggtaggttcctgtatcttagtagcaggtcccttatacagtcatcccccttgtcagccaggggatgggataagttccaagacccccagtggatgcctgaaagtgtggatagtactgaactctgtgcatactatgcacaaatttctttttcctttacagtttcaaggataaaagattcattctttccctagatcttagcaacctcaggatgtgctatttttttctttgcttattaagtcaagaacttttcacttaaaggaagtagtttacagcttctctttggctgactgattgccagcatcactattctggtgccttggggccattatgaagtaaaattagcgtgatttgaacacaagcactgatactggatctggtaacagctcctaagtgaccagtggatgggaagcgcctgcaacgtggattgcctcacaaagggaggagtcacatccaggcgggcaatttaaaattgtgaattgtttatttctggaattttttccctttaatatttttgaaccacagttgaccatgggtaactgaaatcatggacagcgaaaccgtgggtaagggtggtggggagctactgtatcttggttttatggatgaggaaaggaattatttaggtaataagttatagggagctgagattcttggatgttgtatagatttttaaaaattattagatacattactttttccctacaaaaagtatagagagcagaacatttactgtggctcatttgcctttatgactttattaaaatacattcattattaaaaatcttaactagtctttagtcttgcctatcattatgttgattattttaggaaaattaattttaggcaaccatgtggcttcctttctcattctgagcccactgttagtttaggaagaagtcttatgaaaacttctttcctacgaaagaaggcaaatttaaaagcttgtcttaagttttgaatataaattagcagcctctaggattcttgcttcttaagcttaggggagatggctgctcttggtattgctctgttcttttcttccatatcccctcagggttcctctatactgaagccagggactgcaggtccttgtttacatgggtgtcctgtgccatggtgacattctgtgaattgcaggcgttttgcagtgttgagtcctttgtcagtaagactgagacttatcagtaagaaagcatcatgaagtagcttatacaagcctgtcctttttctagaatggttttttgttgggtatggtgccacacacctgtagtcccagctactcaggaggcttaggagaaaggatccactgagcccaggagtttgagtcacagtgagctatgattgtgccactgcagtccagcttgggcaccacagtgagaccctttctctaaaaaaaagaaaattataaaaaggttttaaaaaagtctggaaataattattcctttgaattgatagaaaataaataatatcctgaatattctttggactcattaataatatatatagtttattagaaggaatatggctttaagcttctaattggcctctgggattagttgcagttaaaaagcatttgcagtttagacatgtgatttttatctaaactaaaagatttttggagcagaggggaagggaaactatcgatgtggactgggaaaaattgaagggatttagtagtcttctgaacagataatgaacagtactcatcatggcacatgcaagagacccattccacccctgttctttgagcaccatgagcctgagatagacaagcaggaggagtgaaggcacatgtgatgcactcgtagtctgcataggccattgccacccagtatggctggtggaataggaaactaagctgtttggagtcatacagctgatgaatagtgaagttggcatttgaatttgggtttgtctgaactcaaagattcaaggtccttagaagagatctgtggctgcataaggcttcttggagctggtgaaataggacaccaggcctttaagaggtggggttaagataaagtcagagtgtgagatttaggctgggagggcaccttcagctgagatcaaaagattgaacaaggatcactgagtcaacaagaagagcaggttttactttgggaacctaggggaaaaatgaaattgttaaggttaatttggttaagatcatggaggggttttgttttgttttgtttaggatagctaagcattaggatttaatagtgcagcaaacatgttaaaaataggtgggggcattatgaaacagaaagattgaaagttctatggttaatgcttaatgtatgttcacaggggaggaggttggaggcatagtttttcagatgaaagccagagtcagtctcagccccactctaggttcatgaagttgcctttcataccattaacttcattcagtttcctttaaaaggaaatttccaaatgtaaacagaagtagataatggtgtaattaatctggcacacgtcactccaccttcatcttgtttcacctctgtctcccccttctcatccccgtatcccctgtcccttttattattttgaagtaaattccagatgttactattttgagaaggagtctctctctgttgcccaggctcgggtgcagtggtgaggtctcggctcactgcaacttcgcctcccaggttcaagtgattctcctgcctcagcttcccgagtagctgggattacaggcactgccaccatgcctggctaattttttgtatttttagtagagacagggtttcaccatgttggccaggctgggctcgaactcctgacgccgtgatccgcctgccttggcctctcaaagcactgagattacaggtgtgagccatcatgcctggcccagatgttgtatcatttcattggtaaatatttcagtatgtgcctttaaaagataaagaactttaaaaaagagacataatacagttatcactattaaaatataatttattcctatcaattatccagtattcaaatttccaataatctcataaatggaatatatattattgtttaatttacattgtggggtagtttgaatcaggatccaaataaagtgttaacaatttgttgttatcttttaattactcttcatttctaggattttcctccatctcctctccttctcgtcctctcacttttcatttttttctgttgccatttatttattgaaactgggacatttgtctagtagagattcccacagcctgggatttcctgattgatttgcaatggtttaacatgttgcttggacctttttatttcctataaattagtggtttgatctgcaggttttgtcaaactcatcattttttgggaggtgggatattttattcctgatctgttttttggtaagcatcaaatgtcttgatccccaccccacccccgcttctggtggcattattgatgctctctgcagtcttaatttccagtatatttttactgcattattttgcagtcatccttttgccataagactgccagtaacaaacagcaaaatgtgttctgtagcacatttaccaggcagagtagctgctaacatgataaatattcttggatgtgtgcccaagttttgttcagttttatgtgtttgtccttatacatttgtttttgtgttgctgtgtctaattctaagtataagctcctagaaaccattcagtcattcacctggcttttatccagtacccatccttgctgggcccttgggaatccaagacgatagcatccccgtcttagaaaaatggtgtccagtttgggatacaccacaaatagttaatatatggcattctaagttctttaagaggagcccatttgaggttggtttgaggtagttgttttggagggtgatagggttaacttctagcaggatcttgaggacagtaaggaggaggaagggcatccacttggactggctgaaaggcaccgaggagcagtggccgcatggcccatgggacccgagcagctgaacaggtgaagtacggttttgccccacaccctggggccggccctgtagaagctgacctggtggccggagggtgcctgaagagctcttctgagcccagactgggacttaaacttccttctgtaggccttcgggaggcattttctgagcacttgtatttgaggaagtcagcagcattgaccgcagtgcaggtgtctgccatcggatcaggaggaaggggatggactgggtgatgatttgggctttggtgatgtgtcagacgtgcacagattgtagaagagataatgagttgtgtggggtggctctgagcaatctcatttgggtgctctccttcggtgaggtgggggcccaagggagaaggaacaggtctgtggggtcatttgggagagtcatttcttgacccgatgagtgcaaggcactctctccagaggtccaaacattaaggatgcagttaaggacctcctgtagagatttgggaatcaccaccaagcagggggccacatggagtccttggggtacagacacttgaggggcccccattcttaaaggacagggagaaagagaagagccggtagaggatccttaaagaacataatctggcaggcgggccccttcacctggcttgccagccagcctgtaggcttctggtaatgcttgatgataaggagtgtggctttgccttcacacctgtggaagagaatttttcattttcgcatttcttacttattcatgttactggaattgatgttttagaagtgttccacgtataaactacttaagattataatttttcaaaagagaatttaggggaatatatgaagcccaggataaaaccttaaaaagctaaaattatattcaatcccttattatgtgatagtgtttgaagcttccagttgtctctagtgtacagttattatagaaatgaagagatatccatcactttcagttactccagcctagtgctcataagctagctctgcaaatgacttcagtttttgtttcctggtaggaaaaaacgaggtaacaatagcaactatcttgtggtggtgtcgttaggatgaaccgtgcacactacctctgtgcacagtacctgtcacaagtcccctcttgcgaatatgagctgtcagtggggctttcctgaggtggcaagggctgagcatgccatccttgatgtgcatgttgtatggatttatatcgctttccttttggaaatgatatttgaaattcatctacacacagaaagtggagggaggtcaataatatgccaaatgtctgaagcctagggatgatttcacgaactgtggcaggctgtgtggccaccaggcatcctctctgtggaagtggtcgcagccacctctcccccaccctcacatgttggggataggcttctgtttcccttttacgatttggaattggtgatagggaatttccaaagcacaaagagaaaaggatcaagaaattattgagactactcaaatcgtcattcattccctcattctgaattattgcaagataataacaatgtggccatcttaactctcttcctagcatatctatacttgatgtgaggattggaaaaacttttcttaaataacatgacagttatcacttattccagatccagacaccatggaggctctgttgcattttgtttctgacctgacgctctttgttggattttgctggcatctagaggcctcctcactgacctcttactaggtgccattgccatttgtttgtcaaggaccaaggtgctcctttccctcctccattcctccatcatctgttagtttatagtctgtatgctcttaaattctttttttttttggttactgtctacctatcttcccactcatcccctgctctggttttgctactttttatgatgtagtttgacacctggagtaagttttgttctattccagaatgatggactgtaagtgtaaattgatacttcctttgttaagaacaatttgccagtatatattaacatttcaaatgtagcaatctgatacagtttggatctgtgtctccacccaaatctcatgtctaattgtaatccttaatgttggaggtggggccaggtgggagaggattggatcatgggggcggtttctcttgaataaggtttcagaccatcctcttggtgctgttctcgtgatagtgagtgagttctcatgagacctggttgtttaaaagtgtgtagcacctccctgctctctcccttgctgctcccactgtgtgagccacctcactccccttttgccttccaccatgattggaagcttcctgaggcctcctcagaagcagaagctgccatgcttcctgtacggcctgcagaactgtgagccaattacacctgttttctttataaattatgcagtcttaggtatttctttatagcagtgtgacaatggacatatacaaccctttgacagaaatttcacttgtaaagattgatgctacagagattttcatgtgaagatatatgcgtaaggatgcttactatagtgctgtatgaagaacggaagactggaaacaacctaaatgtacatcaataagtgactggttaaatacgttactccacctacaaataatgcaatgttgtgtggccataaaaaaaaagaataaagtagatatttagttgcagatatagaatgagctctacaatatattaagaggctgaacaacgtgctgtttacagaaaatatgctctagttgtatataaaggaaaaaggatttaaattcacatttaaacttggtaacacattgaaaaattgcagaaaggtaaataaaaaaatccaaagctaggccaggcagagtggcttatgcctgtaatcccagcactttgggaggccaaggcgggcagttcacaaggtcaggagatagagaccattctggccaacacagtgaaaccccatctctactaaaaatacaaaaaattagccaggtgtggtggcacatgcctgtagtcccagctactcgggaggctgaggcaggagaatctcttgaaaccgggaggcagtgcttgcagggagccgagattgcgcccactgcactacagcctggactacagagcgagactcagtctcaaaaaaaaaaaaaaaaaaaaaaattcaaagcttataccatgggaatgttttccctttttaattttttaaaaagtgtctttgacgttttggttattctgcattttattcaaagttacatattgctatttggattttattcatttcctaatgaaagaaaacagaagcactcctgctcctggcctttctactaggcccttgtaatagttatctttaccctttcctgtagtagaagtgggatactagtgttttcctcctggtcatgtttcatttcatactgtgatatgttcaagtacctcgcaaagggaataagcccatagtaggcattcagtcagcgtctacgacatttgttacaagaggcctgggcacagtggctcattcctgattttcagcactttggcaggagaatcacttgaggccagtagctggagaccagcctgggaagtatagtgataccccatctctcaaaatattaaaaaaataaataaattaggccgggcacggtggctcacgcctgtaatcccatcactttgagaggccgaggcaggctgatcacttgaggttgggagtttgagaccagcctgaccaacatggagaaaccccatctctcctaaagatacaaaattagcaaggcatggtggcgcatgcctgtaatcccagctactcgggaggctgaggcaggagaatcgcttcaacccgggaggtggagattgcggtgagctgagattgcgcgatgcactccagcctgggcaacgagagcaagattccgtcttaaaaaaaaaaaaaaaaaaaaaaaatcagccaggcatagtggtatgtgcctgtagtcctagctactagggaggcatgggtgggctgaggcaggagaattgcttgagcctgggagttagaggctacagtgagctatgattaggctgagccacagatcgagaccttgtttcttaaaaaaaaaaaaaggggggggggcggggtgaagaaataccaaactgaaaatttctgaaacaaatgtgtaattactactacgctaaacttttttcacacctttgtttgtgagtcagtttccctttaacctttgactcgtaacataaagaaggttaaggccagagtccatcaatggttaaaagattgtgagtgagatgtagaaaaacagtactgatgaattctgaaaggggaaacctcatttccattgcctggttcttgtgcattgcagtattaccacaatatggcattctatacagcagataaatgtaattatttatatgtgtatattggtttacacactggtgttcactggctgcttaaacttacaaataaccaaagatggcagtaatgttttaaagtgtaaagctgtgcttctttgtttataaaatatgatgctgaacatattctttattttctgatactgtcattgcctttttactgtgtatttgctcttcttgagatgaaaataagtatgtaccaaaaaataaatatagctttttaagatgaaaaagctcaagtttcttatggaatatttttatatcattattaaaacagccaaacagactttatagtcccactgtaagttatatgtagttgttgattgttctaggtttaaacttggcaccttttctatgtgctcccttattaaattaatacttatgttcaaacataagctgaggcagaacacgtttccttttcaatagttctcactaaattttgttttgattttatttccaactgtacttaatagctgaaagcttcttgtggttaggaatagtatttgagattttggtggcatctaattattttgaacttttaaagccttaaagagtgaaatataaggccacaatacatttttctgatagctttcatagtctgttagtctgtgttgcttattttagggggacgatgtctaaattgaaatgtttatccactatagttgtaatgatctttttcagcctctttagaaagcagttcattgagcgaagaagagaaaataaaaagaaacataaaagggtaatatgcataggacttttgagcctgttactatttcctagctgaagtttactttaaaaaaaaaaaagtaggcattgggcagacactgtgtgcacgtgtgttggaggaggaggcggggcctgctcatttgtttgcccattgtgaggctgtcctgcacctttgtgcttttttgtaacagggtgaaggcccctgaatagaggccttgtgccctgcttgatttgaaatccatgctgtttatggaaaggaacctgcagggcacccagcgggaagtctgtgtgacaagtggaaatctagaatctggaagaaacgtggtgtttgagggggaaggtggtggggagagtggtcataatctttcagcctttgcttttgtgccccacaagcttaattgtcaccctctgctggcaaccagattgcagagccactctgtaagtgtccttggattgcctgtgcttactctcaccttattgttatcaaataaaaacctagacaaatagcattgaattctcttagaaaaatatgatatgaactgggtacattactagtagaggttaaatatctgaggctttttttgtttgttttttgtttgtttgtttttttggtggagatgtatttaaagggaagaagggctacatgtgaaaagctggaattattggcacgctcctgtatttcagagcgtgttgaaaagcaggtcgcaccaacactaggctggttaaatccagtttgtacagcttgtgtacttggtggtaccagctattgctccaaagtttcctggcttaagaagccatgtaattttaagtgtgcaagaaaggggtgggacagcagaagctttttataggatttcaagtaataaacattaatttttaaagcaatattccagggacttaacagaagtagaacttgtatatgatgtttctttaataccaacacatatttgaactgacaagggaagggagataattttattttaaagcaatattttccattctttttttctcttcaattagaaactggttcttcaactttcagtgccaattgagacatgctataataagtatttaacaattctgtcctgctgtttgacttcagggggaaacgatggtagaatgtttagtagctgagcatacacaggtagctagagatctggtatacagtaaatgtggtgtggtgtggtatttgggttatatatgctaattatttcagcacaatgctgaaaccatgcagaatacctcttggaagagtgtttgacaagatgccagaaaggccgtgttaattataagtttattgtgcctattcaggttttttgggtgtgttttgttccccactgttgttttattctttatgatggttctctgaaaactatgccccatgaacatatggagttctatatatgcgtgtttattggttttatagaaacctcaggatcctatgagcttaataacgatttacgctgttatgtgggtaattgagaggacctgttaagatatagttgatagtaaggttttcgttagttatttcaactttttgaggtaatattaaaggcagtttgaccaaaatcggaattcaacaatccagggagcttttggtttgctctgggttcactctgggtttaaagacagtttggtttggctacagctgacctccctccctgtttttatgaactagtcttcttcctgcaaaactcaaatacagtacttggtatggtctcataataaatttagttgttaattatatatatatatatatatatatatatatatatatatatatatatatagtttatatttctgctgttattcactgctttttaaaatttttgcttctgataatgtattaaattatagccataacatatttatatgcctgctaaaatgtaacagttgttggttgtgataagcttttgttttgttttgttctgttttgtttgacacagggtctcgctctgtcacccaggctggagtgcagcggtgcagtcaaagttcactgcagcctccacctccaggctcaagctatcctcccacctcagcctcccaagtagctgcaccaccacactcggctaattttttattatttttgtagagatggagtctccctacattgcccaggctggtcttgaactcctgggctcaagcgatctgcctgccttgatctcccgaagtgctgggattacaggcatgagccactgtgcccagccaagcttttgtttaattttagttactgaagaagcttataactcattgagatatttatgaagtgctttgtgtttgtgtttttttttaggacatgtctcaggaaggctatggaactagatctcaacctcctctggcccccggaaaacctaaccatgaagacttgaacttaatacagcaagaaagaccatcaagtttaccagtaagacattattgtgctgatttggaaatgtaatgagttaaagacttttagaaagagctgttgtttttgtttgttctactttatattatgacatgattgagaagtttctagacttcaggtttattttgtggtcaatttttcaaggtttaccttttaggagctctgtagtcctggataagtctatttcatgtgtatatatctctgttgcagagtgtagacatcagttggaaggttttatgcggctggtcgattttgtgtgcaggtggttattgctgttgtacagttgagctttctttaggctgttgctttttggcagcgatacagaacagaggtgtccttagaggagtcaaaacttaaaagaaatttgcactttgcaaaggatacaaatgatgagataaaatacctgatagtaatttgaatttcttctaggactttctatttatgtaatgagaaatcacccaaaagaaggtagtttgaaatttgaggccagacgcggtggctcacgcctgtaatcccagctctttgggaggccaaggtgggcggatcacttgaggtcgggagttcaagaccagcctgaccaacatggagaaaccctatctctactaaaaatacaaaattagccaggtgtggtggtgcctgcctgtaatcccagctactcggaatgctgaggcaggagaatcgcttgaacccaggaggcagaggttgtggtgagccgagatcacgccattgcacttcagcctgggcaacaagagcgaaacttcatctcaaaaaaaaaaaaaaaaaaattgacaaagctgtttatttccaccaataaatagtatatggtgattggggtttctatttataagagtagtggctattatatggggtatcatgttgatgctcataaatagttcatatctacttaatttgccttcttttatagagaacctaatttaaaggaagtcttctttattaactaaaagaataaatctgcaggaggctgaggcaggagaatcacttgaacccaggaggcggaggttgcagtgagccgagattgcaccactgcactccagtctgggaaacagagcgagactccatctcaaaaaaaaaaaaaaaaaaaagaataaatctataccaataaatatttttacatttatttgaagaattgttgtcattgcctagtttctatggagaaggtttgttttaagatgggaattcagtatagccatgattttaattggaatttcaactatgtttgcattaacttagatttattacttctaaacatttgagaacagacatttgtagtgaatgttaaacatgacatttgacatgcgtaccataccatatacattttaatgtatatgcagatttagagaaggtaagtgatgaccacaggatgtctactgtctttgaatctgatggatatatttttgaaactctaatttttataccttttacttttatgtgagagagggtgaaatcttattgtggtgtttttccccccccctttagtagtgttaatgtatttgttgtctaggtatttggttttgaaggagggaaataggtaatggattttgtgttgtatgctgctaaactttctgtagcagatagttcgcagcttggtaagcatgtagtgtgtacgtgtgtgagagagagagaaggagagagacagaggcatgcatgctgtcgataaatactacatttgccaagtatttggaaattagcttttgtggttctatgaaatttaaatagatgcatgggaagcaggtaaacagtgaattccacttttttcagcagttttttagtggttttggagaggttcgaccttgtagatttgtcattggctgatgattttgtactgtgacacaggttggtaaatttgtcataaatggatgcagattttctgcatagctataaaaatagtttgtggtaaactgctttcttcatatctactcagaaacttcagcatcactcactagtgcgtgccttttgccatggatctgtgttggattggatggttgacattcagctaactctacagtgttattagggatggcatgaagtattgtagtttcagataactgactgaagagtttggtctgggataggagcttttaagttgattgctggaagagtggatgaaggcatttaggagatgaacgaatatagtcatcaactgtttaaatgttttctgaattgttctatttctgtcttgttatgtatgtataacagctatcttccttaacctttatcttgcctacttcccaaaagtatttaaagttgtccataatgtaagttttttttttaatgaaataccccaattggtattttctttccgtttttgtaactcacagataaataagatgctggttgactcaatagtacttcaaacacatttcaataatctttagagagcagagtttccaggttttatgttaagtatgtagaagattcagttactgaataaaggacaaactgtaagataacctgctacacctaaaacccccaatctgttaggatgaaatttggctgtagttaaatgaaatttattgcaccacttttttttttttccacgagggctttgcatgtgtaaaaactttctgtatggggcttacaaatattttaatttatgtggatacttataataagttgcacacagctaaggtcattgtggtttcagggaatgatttgttgatactctgttacggctctaatagtctgtattttacaatgttacttttattagatactgtagtcctctaacttggctgggttgattctggagagcccatgaagctgtatttgttatcacatctgaatttgctgttggatcctttgtagatttactgttgtgctatggttttccttttcaggtgtcagggatataaattttgtcttttcacctacagtcaatccatgatatttgaaacctgtagttttgtaatttggaattaagtatattgtgttatctgtaccatttatgaaatgcaacatagtgattctaatgtgtaattattctgttcattttatgtaatgacgatgacaagaatgcctctcaagtagtaatttcttagtctttttgcttacagataggtttgtaatgtttctgcatgtgatattttctacctgtatcctaagtagatttttctttagcatgtttgttacaatgtaacaactttgcattataagaaatcaaggcatttccaatatctttatgctacatctatactttgatccctcagcaagttgtcctcactgttgtgtgaacctgtttttctatatttgcatgccattaaattcttgatgaccttcagtaggcaatgcagttatgttttccagctaacttagatagaccttcacatcatctgcagaaggcaaatgattgataaattaataacttgttctctcgttatcttggagccatgaccagtcatatttactttttgcttagtggactcagacctaagcactgaacaaatcctccttaatatcgtccacttatttctatacctcttagtcgtacagcatttccctgtttagttgtattagtttatacatccttggtattactgttattgataaatcttaacattgaagagctctctttcttagactattatcacttaaaatttgagcacatttagctttcacgacctctaatattggtatgaaataaacctagcatttaagctaaagacacagtggaatgtctaaaagatgctgtcagttacttattttcttgtttcataaacattggatatccctcaatttatattccaagatagccctcaaatatgatttaatacactttttgttgagtgttctgttaaattttcacctcttgtggcatttattatttatccttttattatagttatcctgaacattgtcttcgctcccctatttcactagaagcttttcatggtatttattatgtcctattcagtaaatattttcctcaaaaatttctataaaaattattttaaaataaattatttcctcattttcagaattttcttttaattgctaagggatctgttaggtggcattgaatggctctcggggcacctgtgctctctgtgctggtgctgctgagtgattaaatgggtggatgtctgcatcgccaggtgggtgttattcttaaaatgattctattttaccaagtgacatttggatttactttggtaaccatagctttaggaaaagaagtggacactttggataattaagctaaaaataccctaaaagcattctgttcttagtaatacatcttttttacttataaaaaattaattgacagaaatggtaatcataagttcagtaattatattacagatgggtagttaataaaatattcgtaaacatgtataaagggaagtaaacatgaaaaaggaaaaagttttattttcttataaaacactatataagcactttcttatagtgcttttccctccagggatctgaagagttgttaatattcctcagtttaaaaataactaatttgttttattcttcagagaggcatgctgctagctttgtatttcagataggaggttcattattctgtttacctaagatatagaatacaatcagtttggaatacaatcagtttggcagtcatactctaagagcgtttgaaaatggactgctttgttaggactttgtgaaatatttctataaatattggctgttctagaaggctcatcaggtcattaaaaacctctttgtgaccctttcttccttaaataggaaatatctaaagaggttggcatgaaaacggtttgatctttctgagttaactaaaaatccctgaatgtgttgaatagtgcttatggcacttttgttgagtttgcaattagacggaaatattgggctttagataaaacatatgttttttggctctttgtgaaaggaaggaggtagtaaatgctggtcgttctttgaaatagagggtgttaaacaggatattggaagcctgaaagagaatggttggaaaacttttattaccaagaatattcttggggcttggctattagccgcagagcatgcagcgttctgcctttaattcaagaagaatactctgtttgtgttggtttttgtttcttaatctttaatgacacttacgttggttagtggcaaaaggtcatgtgttttggaagcatgtttgaatattgctgacattcatatggatgttctaagcatgtagatttgataatactgtgaatgattggaaactaccgggaaaagctttttaactgggttcagctttttgctagttctcagtccaacccagctagaaatgtaaattgctaagaccatctgaacctgtgagctggcaggttttggcaaaagttaaaatctaccaggtaagaattaggtgtatggctattgaatgaagtattttgaaacctttttatttgaggttgatttaaatggttgtcattaaaaggttaagagtggagctgtcttccgttgattgatccttctcaaatccttatgaacattaaaaaaattataagttaatgaaggaaaacccatatctgtcatcaggcttatctcagtgttcaggcatggatgatgcctgtgtgttgctgaagacttaagctgtttattatcagtattctcaaaatgttattaggctatgttgagttttagagtttcagagaaaatactttataaaatggaagcctcctgtgccagggaggaagaggaggttctctgaaggatggtgccctgtcccccagaacagctacaggcataccttatcatctgcatcgtttcaaaaccaaaggtacagatgcattttgatgtcttggggaagttttaaagggaacatgcaatacttcagcttcttaggattcatcaagttcttgaacataattttcatcactggtctgttctatctggagatatcagttatttttggattaagattaagagcatttcaggaccttgctggaaaacctgaatttagaaaatatgatagtgactctgacagatgtttattttccaaaatggattatttctttaggatgtgatatcctgtgattttattccctaggatattttcatgatattgatagtcattttgaaaatagaggataatgcttgaacttgaacaaggtaggaagcaggaaggtatgtctgtctccttctttcaaaacaatcttccatttaaatatttgttctgtaaatgaaaattcaataaaaccttaacagtttggaattcttccaggaaaaaacaggctaaatataatggaaagtctgaataaattaatattgagaaagaactatagtttgcttttaaataattcagatgtttgtgtgcaaagtgtttctaagttgacatactcagttcccgttaaaataaaattctgaattcgtcatagctgagatatttgcttagtggtaatgttttaattttaagaatttgtttaattttttaaaatacatttcaactaagcatgcccctgaaaactttttcatatagtattctgaagatttccatttaaaatatgggggaaatgaatttcaacccattttataggagtgtcaattagttcctaaaaaattaatgaaggagtatgaaggagtactataaaaaaatagacactagacaaaattggagattaagagaggctgaagcataactgatttgcaggatattggttttgataatagaaggataaggatgatctatagttgataaatgaggctcattaagtaagagatgataaatgcagatattcctggctaatagaaaagtcagcatacaaattttgccataacaagtgagggatgggcaggctttgaccagcttgcagctcttccagtgacctctgtgaggccacggagctcttctgtggtctggatgcctgggccacagaggcagcgtggaccccatgggcctcaggccagcagaagggggagccagagtgggtctcagggagtctagagccacctagagcagagcttacaaggagctccacaatggtgcagaggccagggcaggactgcagctcctgcaagtgtaactttttattttttatgctaaaaagaaaaaaaaaaaaacacatgactctaatgttctgaggtccctcttctcaccctagcctgcacttctggttttggcatggcagtgcctgccatgttgggctagatgccaccatcttcacccacccatcctcctcctcctattgcttctcctgggcattgggatctgctgcctccagctcctgcaggcaatggccagtgtgaggcgttgaatgcattctactttatattatccaagttaggtgggaaatagcttttaatttacagattttcacttcgcaggtaactctgaaggcacacatctgttttatataacaagggatatataaccagcaggagctcatagtagcatttgtagactggttatttgcttttatgtttctttgggactggaagtaacaatttttaatgttaactgtcagtttaggagaggaaataaatacatgtagagaaggttctacctgagccaaaatttcccattcttccctcacaatgtaggattttagaggtgtctctcttgttttctcatctttttcttttgccttctctaaattgttgtaaaataactgaatggtcttgttttcctttgtttgggtcaagaaattttagcggaaaattgttactgtgtgaaagaagattattgactcaacaagccttcaattttccgtgaataacactcccaccccctagcttcaggaacatgccgtgcgtgcattctattttaaaatatagactgtaatttaaaacaggcattttgatgccccactgaactttgtttaagcctggaataaaagaggagaaaaaagctgtaagccacaaaaaagtgactaagctttctcaactacttttcttcataatgcattctttaaaaaaaaaaaaaaagcatgttggtacgattgtctctttccacaggaccgaaattgtacccaattttagatcatggtgtgcacatctttctacttggttcgtgattgagataccatttacatttttcagtgcacaggtttgtatttgttgctgtctgtatgcatgcatctgtgcatatggtacgtgttcattgcatgtgagaatattctaaaattacgtatatcatttttagcactcacttactaatagctaattttttagagctcttgatttaacctgattattagactgaaatgaaataaatatttaactacaattttatttaccatcgggtcattgtaaaaattgtgatttgaaagtagtttatattacttgccttttttcctcctcacaaaaatgaaaataaacagcttataatgacttgtatggaagaaacaattgctttactgtttttataaaataatatgttttggctgggagacctattctaatcgccacactgaatgccaacagggcagactctcagctaaggttctggccttgagcaatacacgtcatttctcagagcttctgtttctttgaaaaatgagtaagttagatttaggaaactctagcaccttctagctccaaaattttacattaaaagccatctttgttagtgtatgagaaaaagcactgataaaaacgggccctttgcatttgggaaaaagtcagtggagtgagtaaagtgcgggtacattgaaatcttcagaaacggctcctgtgtgctgcttggtggcctctcttccattctccgatgccatttgcttttgtagcagggacacttgaacttattgagggatttggggttgccttactgagtatataatcttactatgcaggccattggagagccgcagaccttcctgtggtctccctcttcttgttcatcctagagattccagaggtcctccttcctctcctgtatgatcagtttgggagccgtgatgtcgttgcatatagggaagtctagggaaaaggaaaaaacttcatgggaaagggaagggggaggcagaacaaccaaccagccaaccaaataaatgaaaaagctgcaggacgccgaaatctttgtaatgcaaaggctaatgccaaccggatggttttctgaaccaagttgatcatgtggcagttgcttttcatttcttggtgggggaaggaaggccctaagggcatgtatctgaggcctcccttcacctccaaacctcaggtttacatttgttatactaaaaagtcattcataaacacactatgctttttaaaccgagattgacatgaatggaagtagtagcaacccagagacatgaaaaaccactgttcgtctttaatgaaacccaagctgttttcctggagaatgcctcctgcatcccctgcaagctttttcttcttcttcttctttttcttttcctttttttttttttttgagacggagtctcgctgtgtcgcccaggctggagtgtagtggctcgatctcggctcactgcaacctctgcctcccaggttcctgccattctcctgcctcagcctcccgagtagctgggactacaggcacttgccaccaagtcgggctaatttttttgtatatttttttttttttttagtagagacggggtttcaccatgttagccaggatggtcttgatctcctgaccttgtgatccgcccgcctctgccacccaaagtactgggatgaccggtgtgagcccccgcatccggctttttttttttttttttttttttttttttttttttgtgagtgtttagagctcactggttttgatctgggtagagtggtgtgttacagttctcatttttacttgttttctcactgctctttctgtcagagcacaaaatggtatgcactgaggcagtggcagaagccatgtccgctcctcaggcagatgtcctctctaaagcaggccacagtgagcctggggaccaccgagtgtgctgcggcctcctggcacctgtgcctgcagattctttcctgtttttagaatttcctgacttgcgtaggtagggatctccctgagtctttcttttccccatgggcatgggtggttgagctgtgcagtgagtcagtccacacctggggaaaatgtgtagttggtcttttggaattatgctgtacccggaaaaagtttggctttagaatggtaatatgacacttcattcattggacactatttttgaaagtctggttgtatataaatgaaaatagtgtctgggcatggtggcccagcactttggaaagccatgagtgggcagatttcttgagcctaggagcttgagaccggcctggccaacatggtgaaaccccatcttcactaaaaatacaaaaattacctgggtgtggtagggcatgcctgtggtctgaactactttgtgaggccgatgtgggaggatggcttgagcctgagagatggaggctgcagtgagcagtgatcacgtcactgtactccagcctgggcaacagagcaagaccctgtctcaacaacgacaaaggtgaaaatattagttaatggacactagaaactgctagtaaaagaagaataatgggccaggcgtggtggctcatgcctttaatcccagcacttcaggaggccaaggcgggcagaccacttgaggtcaggagttcaagaccagcctggccaacatggtgaaaccccgtctctactaaaaatacgaaaaaaaaaaaaaaaaatgttcgccgggcatggcagtgcacgcctgttatcccagctgctcgggaggctgaggcaagagaattgcttgaacctgggaggtggaggttgccgtgagccgagattgtgccattgcactccagtctgggcgacagagtgagactccatctcaaaaaataaaaaataaataataaataaataaataaatatgcccattagtgagtgtccaagatagaggtgtgtgaattttaaagacagggcttcctgacatctatgtgcctgcctaaagcccactccattcttctatagtatttcgaaagtctagagctttcaggttactaagcgcattgtaacgcccttttaacatatgcaaaacttcattttcgaaatgctgtcatgaccctggagcagggacacaacttgagagtgttagctcagcgatgctgtgaaattgtggtggcagtgggagtgcagaggaagaaaattgttggaatagagggagggagggagggaaggaggatagatgcttttgaggtttttaatctgtgtgaccaggatgtgttggtggcgttgctgacaaacacagggaaacggtggtgggaagagaaaggaatgcccagagatttttatgagagtaaagcaagtcctgaataactgctcaaatcctgtaacatctaaaaggaagcaactcactcatctttgctactaaagccttatttcttatatagttctttatagaagtaaaacattgtcataaattagaattgatgttgaaatattgatggcattggctataactttgcatttcatttaaatttttggagatgatttgaagggtattgtagcagactgtgtataaacaactccacacatcatcccagagtgtctctaactgtaactgggactagggcaagagcacagtcccaagataaaaattgaaactctgtagttcagttgggactcaggctagtcttattttctttgcttttaggatagtgcagtaaatttctatccaaataggttcctttccttgggtaaagacaagttactttgtatttctttgtttgatatatacttttgaatgatttgggctacattcttactttagttcattttggaggaatatttcttagtttaatttgtctcattattaattcctccttctctgaaactttttggggatataggtatgtatggcatagtctacaaatttaatgcctttacttgtttttttcttttttgcagatgtagggcgtgtgagtatggggcgatggtgcagggaaccttgctttaacatgctattttgaaagatatccccttttattttgtagaaatgggttaccacgttgagcaccaggagtttcttgtacatttggatcctagcagaggaaatgggactttagaaagattactctgaactctgaagggctaatttaaaaaaaaaaaaaaaatcaagcccctccccctattttttcttcatttttaaaaaggcctgtcattttactccaggaaatgacaaagaaaagagcaaaggttttgctttagggatgaagggaaaaacttttggcttaatttgtttaaaaaattctttttgtataagctaaagatgaaacatattacagttgccaagggcaattaatgaaacaagaaaaattaaaattaatgatttcttaacatgcatgtatttttatatatttaatttgatttggattatttttgagctgtaatttccagctacgaaaacagagactccagaatggcaggacagctgaacagtggtggaatagtggtctgtctggagcttgttccagtcatgacagcagctccttcaggcacctgctcctgagcatggtgccaccatggtgtcctgtgagctttttcaaagctaaaacagtctctccttttaaataaaaaaactattttgctaattttgattaaagttaggggtattcttgaataaatacaaatgtggtcaaatttccccaaatgtgtttgcttttcatagttgctgcatttatttatttatttctatttaatatgtttttgagacagagtcttgctctgtcacctacgctggagtgcaagggcatgatcatagccttgaacgcctagactcagcctcccacctcagcctctcgagtagctggaactataggcgtgtgccaccacgcctggctaatttttaaatttcttatagagatgggggggcagtgggtggtgggggtggagggtgtctcactctgttgccaggctggtgttgaactcctggcctcatgtggtcctcccacctctgccgcccgcccaagtgctggaattgcagatgtgagccacagtgcccagccccatagttgctgcatttatgcctttctttagccagcatgcctaaatgttgacatcctcaattaagacacagtatcttgtcttttccacatctcaatgatgcagaaaaattcagttatgtttagtaatcatttattgtgtctaatgtctaagattttatattagatgtaaagaaaaataaataaaaaatcaaattatttcactggcttattaatgtctgttctttcccataacacattcaggaataagaaaagaaatcctcaacagaaaatatctacttttgggatactggttactgaaaatactttaacatcttttttcattttatcttcagagaaccacgtacctatagttgcagaattcatactttcagcacatataatttcacagaagtgttttgccatcttgtggaagtcttgactatttgaaagtttaagagcagcaatggctatgacacaactgtggtcagagctttttatacaagacattcaggtggcattgagtcacgtcttatcagtgctggtgatttcagaggaagagaacactgccttccaagtctcccaacccttttgtgaacacctggtgtagaagagtaatgtttatgctggctttcttgagtggcttcatgaggattttattatttttactactttttttgctgacttaattggcattttctatgttttatagggataaaaacatctttcatataattctggcctgttttaggggtatcagatatatatatctaaatatgcacgttgttgtttgacaaagaacatttcacacctaattgagcttttcagccgggatactccacctagagtactttgcacatacatgagatctaaggttcataaaccactttggcagtgcctgccacattcacaagtgtccactgaatgtcaatttcttgccttttctttgccctcctccttttgtgaaatgatatttggcttccagggcctgtcagggctgccggtgcaccacacttccctgagattcagcattcctttcctatgagcaaggaactggaacaggcggctgactcttgtctaaatcagatccccaggactcctagcctgtgacttcattgctgaaccccaatgctgcagtactctttggatgcagagaatgttggtgtaaatgccactgaggttcttctgcatccattttatttcatgttcctcagttttatattttttatattttatcagttttaccctgcacagaagaacataaagaagagaaaactacattaataaaccttgtgtttttaagaatttccccagtattacgctgccatttttggtttgttgagctaccaaaaactaaactatggggacgagtgaagatgaaggggtgaaatcctctaggttttaatacattttaattaattattcctaacaagtgaattatttctaacttgtgaattatttctaactccttaggaataattataggtgtatagtttggacaattaaaatatgttgataattcggaaatgtgatgttagtgactagtgttagactaatctgcaccccagctttatcctcagagtcggttggtagcatagtggctgcagtgattggggttcaccctcccttgctcatttcagctcatggtattactagtgagtagcaagatcacctaaaagaaggcaaaagcaaaggcataggtacagatctacttggtttgcagcaaatctgctttaggcaaactccttacattgctcaaagagttttcagagttttggtacaaacaccatataaccgtaataggagcaaccagccatgaaggataacacaggtctttagtggaagaccaaagatggtgaatcaggtagtatcactaaatgcacttttaagtcaaatacttaatgttgaaactttatttaaaatattatataggtttgtgtatatatatggggatgtaagagaaagggacatgcctaaataattacgttaatataggaaatatacctttttcaattctgccttcttccatcgcagttgattagatgacattaaatgaatatgttgttgtgggccaggtggtattttgcgggggggtaacaacctgaaagttgtcctggttttttagcgctgctctttccgagtcttatttattgaagtttaaactattcataagatctagtggtaactgctgtaaaggtaactggggaagttatagaggaaatgactatgactttaccgttgcaaatagattaatgcactttacttttccccaacatttttattgactgtcctgtcatatcccttcttaaatcatacttactgttaccagttttacctttgaatttacctacaaacctaatttctcattaaaacaataaaaatgtatgaagtataatataattgatgcaattttagcctccctaatgaattttttaaaatactctggtattttaatataaagtattacccagatactctataacttaatgatcaaaatttaagaattaatttctttataaaagtgtttaaaaatagcttggatgaggtattctttcaacatgtatccctgaaaattataaataaatggttatttttaaatataccagtggccacttttaactgaaagagtcctggtgtgacagaatgtttcatatcctatgatgtttttatatagaatttataacccttgtgcttccagaaaggatttgagctgacttacagtaaaacgtttgtataaacaaagactgctccaagcggattacaaattcttaaaaaagtttgaaaaagagagaagcaaacaaaccatgataatgcagttactgatgaataatgattaaatttaaggctacattcctgactagcaaagtaaaggggaaaaattgggattacctaattattaaagtaaaacacttcatttattttctttctttttcttttttttttgaaatggagtctcgctctgtcatccaggctggagtgcagtggtgccatctcggctcactgcaagctccacctcctgggtttacgccattcttctgcctcagcctcctgagtagctgggactacaggcgcccgccaccacgcccaactaattttttgtgtttttagtagagatggggtttcactgtattagccaggatggtctcaatctcctgacctcgtgatccgcccgcctcagccttccaaagtgttgggattacaggtgtgagccaccgcacctggccaacacttcatttcttaagaaaggaatattatttttcttttattatattgtaaaaggaaatactttataaaggaatatatactcttttgaaaatagtgaataatgagtccaaaatatgagtttttaatatagtgctaaaaaagtggtttcatgtttgggaaaattatcaaaggcctaaattaggtgtcatgccacataaatgattgaataattatctgtttttgctgtaacttgcttaactactttgttactctgtccaaagaagtagcttattgaacccatttttatttcacaataatttttaaaaataattattttataagcataaaacgtgtaccagggtggaaacccatttagtcaggaaagagttgaattgtgaagagagtgtttttttatacatgtgtttttctttgttttgagggataggtgtgtgagtgacatttgtaatttagcttgtttttctgggaagaagattgctgatccttgggtttaaagatgagggctcaagattaattgatgagactagtgatggtctaaattttacagaacatgcatgccactaatagcttaatagttaggatgataacagtttgtgagtgaatttatgtgctttatttttctcgaacttactgactttgaatacgttataaaattggagctgtgctcctaaggagtaacatggaactccatcataggtccacctccagcaaaaggctagcaggggtggtggggacactgaggctggcttgatttcccatcctgccccccatggttggtcgtgggaagaaggtcgggctgccgtggctcctgtgcactttggttgctgagagtggttgtgggcagcaggccggtgagcagtgggggcagggatcttgacaccagcccttgttggactccacacccttctgaccattcatccacctttgggagtggggagcagggtctgttgaaagaggcagccgtgtcatgctcctgttagtaagggaactagacttttttgagcctaaaaccatacaagagaattcaacagaaagagaatttaatgtatatattcattcttgtaaaacaataatattgtagtaaaacttacatctgtgtgtttgctggccaggctagtcatttatgactttcttcgagtaagcgaaaatccttggagtctggcaattcttccttgtagggaatcttcaagaagactttagctccaactttattcttttgtatttcattacctctgggaaaattactagctgggcattttgtggcattctcaacctcaactctagggctagtgcttttaaaatctggtcaactgcgtaattgtgaaacagtactgtgtcagctttatgcacttattattatttttttaagacacaaaaacttacaaattggcaaattgtttttcagtgttttccccttcacagggctttaaaaatatcttgagtatgttggggttagattgggtggttggaaagcaaagctccaagtgctagaatggacggctgccctctgcagcttcaacacagggatccactcagcccccttagctgactactggtgcttaaaacggtttttgacaaacgccagagtttcacaaatatagaagtagcagttatagaggtggttttgcaagtcccttggaacattcatgcaggtctgcagtcactcttaatttgaatgagaaagaagatggtagaaactatttttattttctcctgggagcaagagaaaaggaaggctagaactctgtactatgtaattttaaaaaaagaaaaaaatcggactccattgagattctttcttgtttactttttgttttactctctctgtctcctagtatgtttgactaatgtaagtcttcccccaggaatatgagaatatgtggtaccgtccgcctcataaccttcctggatatttttataatttatcatcagctgacactgcttgggtagaatattcttaccactccctctggctgctggaagtctgaaattacatctttgtctttgaagtcaggcatactgttagcgttgctatggtgacagggtgggtaatggcctccgcagacaggagattggtatttagcgtttaaacactgctgtacacaaggccttgatttttagagtggttactgaactatccccttttagtaaatgtttaaaaattacatttttacatggtcttactagattaatagtcatggtttatttcattttaactgcaaggataaaagcattattccattaaatgggcagcttttttttctcttttggtttatgcattattaacacaggctttcctgttttgcttgtaacattttataggctttttcaaacacgcagtcagatttgctctgttgctcctttattttttggacttagcccattatctgcttgatcttggacaatttcagaggagacaaagttctaaggaactaagcttttaaaatattaaaaatgaagttcttttttttttttaatgtatgagtgataatattgatcaagatgtctctttggtttcaagtttctagttagcccctttcctgaactataccctcacatgagatagtaaaggaaggacagtttatggttctggagaactgttggacattttgaaaatgctttagttgatgtaactttcgaagcaatatgctctgacatagtcagcctgtgtggaatgaggccgtttgcacacacatacatatgatttttttttatctgtgagtattttgtctttagaataaagatgaatcttaatagtttgtatggtatatacaagtccctgtctacctgatacataaactgctactaaaacatcatttttaatgtcttgtgatacagaatttattactttatgaggtattttatttgtggtaatttaaattgtttaggaagtttttccttacattagctcgaactgttttttttgtttgtttttttaaatcctggttctacttctgccttcttaaaccacacaaggtaaatctaaatccttcttctatatgacggctgttcacgtatttgaagatagttttcatttactaggatttcttctgggctattaatagttactttaactatttcccccactgtgtggtctcaagttcccctgcaccctattcttaattccttaatgagcttcatttttgtataagcacctctaaatgtgatatccacaaccaaagggcaggctccaaaggcatggctggcggaggccacctggcccgctttgtgttggaccgtcacgctgccgtgtatcggaggcgtcagggtctgcagggctttgcggcagctgcagcccactcttgccactgtgatgggagctgctctgaaggatacgtctcatccatcctgcacctgagctcaagtgctcatcgacccttcctggctgctgttggactgggtcggggctgttgttcaagcttgctaacgtgtgttaggatcctgaatctggcatctgttgtatttagtgtaattcctacctttgtgtcccctctgaatttgtatctcatgatagctcttaatacagaaagttaaataggctaaatccagagctttctgacattctggttattgccattcaaccaggtgtgataaacctagagctactgtatgttccaggccatacattacatattaaccacaatcctgtcctagagactttatctgaggctaggtggggatccagaacaacgctatagtcctttctgtatatgttatagtgctgtcttccagaatgacttattgtggattatatatgacttccaatgatgtaacacatataaaggctctgtaataattgaaagttatacataatttgctattgacataattttatctttatcaagttttctacatgagaggagaaaatctaccttttaagctagttcaccttgccacctgagtgatacgcctcagctccttccctgtgtccaggaggaacagccaagataaacatcaagaaaaggtaggagaacctatgcccatctccagaagggccctagaaacagagcctggatgtcatggggtccaaggcagaagatactcgccctggacttgggatcttagaaatgaagtagccccatttcaggggcctaagattttagggaggagggctgttggtctcagaaaccctatcctgttaggaaggttactggaggccgctggtggtggaagccgcgcctgttctatttcctcaccttcctgtgttcatctgtgtatctgccaagtgccctgtgctttgctttttaccaccaactgcttgacagccgtccaggactgctgggttctggacataaggtcagataaaactggcctagtcttttctagggatgtaaaccttggggaagacatgcaccagtggcctggtactggggacaagagcagggcctctgcttctgtagtgcacaggggctgcctctagcaggggaaggaggtgggaggcaagtgggccactcagaaaaagacattcttttttgaatgagtcccaggtacttttgtgagttcatggaggctggcccataatttccactcggacttgtcataaactctccctgcttcttacccccacccttctctcagaagccaggactcagtgagttctgggcatgggaacctgggaggcagagcacttacaaatgaaaatttggcaataagttttatagactggaaaaaaattgcttcagaccagtgctggtagcagtggagtggcagataggaaatagtcctctggaggtggcctctagggacagcagccctttctgtggtcagtccatagaccctctgctgggtcaccatggaggcttctttaaccagcctgcagtttcagcttgagtttggggtgaagggtggatgacagcttcttagtccactgatatcttaatgagatttccattcagtgtattttgcatctccctccaaaaggaaaaatatatgagtgaattttgtttatagcatgtgtagcaggcaggatgttgcagggactttgggatattctggatcagcactgtccagtagaactttctgcagtgatgaaaacagtccctatctgtgttgtccagtatgtcagccacttgccatatattgttatataccacctgaaatatggctagcagaaggaattttgcgttttagttaaatttaaacaccctcatgtggctagtgccgaccatactggacagtgcagttctagattatggatcccatatggtcaggatcttattacagactgaatttggtgaaaataacaatgttaggttaagactctcaaattcttggcatgtaagttattgatttgtaatgtattctgagctggcatttaaaattacctcatttttacaaggatacaagagattgaaggaacaaatatattttagatgtagagtttatctgttgcagggtttggcatgtaggccaggaaccaagattccaggagtaagaatggcacacttggtgaaagagtgctgtgcacttggatgctgatttacaagtgacagagccactgtgtcccacgtctttctccttgcctgtttctctgggttttcagttatctatgtttattggaaacagttatcacagagttgagtaccttgaagatctcttgtggacatccccacttccttcccacatactcaccagtaccagggtcagcttcaggtaggaggatggcacagactcaaggtcaagcagaggtgtgagccacagaagcagagtagcaggccaagttccagcatcctggctgccaggaccaccgtgcaggcttaagaagctggagctttaggatatggagtgtccatcacttggcatctttctcatagcccaggtggcatctgagaattaggttagggttgatttggaccctatggtttggtaaatcatgtcccttgaatgtatacaaatgatgtctgttgatatttaaaatatgtttctttctgtttaattgtaaaggggatcaggaagtcttttctcccacgagtctcaaataatttcatagttagaatctggtaatttcaggccagcctagggcttttcatgactctcactttttaaggctggtatcctcatttgctggatgagtaggggttctgctgatggagataatgacaccaggatacccatgtgttgagtccatcttgctgccccttccaagccccccaaacaactggagttctgtattctgctagggaatctgttatgtggtgtagccttcctcttagacttaattcattcacttttttagtgctctacatgtttagaattttcataagaactgcattttacattcagtataatgtagttgggtagttagaataatatgttccaagatctctgattcatttgtcacccgccttgcaaactcagctttggcttgttgtccacatccatcccactgcacacggcagtctaccatttgtagtccaatccatgccttctggctccatttcctgacatcaggaggttaaagactaacttgttttctcctagtcacagctccacacctaggaacagctttttcacttttaaacagtttatctctgttccccctaccccctttaaaaagaaagaaaaacactaggaatgagtaatactgatttctcagtatttgtttgattctgtggcatactgtacacttcagcagcaaaagtagatggttgagttatattgctagttcttactcagtctataaacctaattcgttttatttatgatgggagaaggagaatttatgaattcattttgttaagcaattcttgagcctttgtagtgtgctattatgatggatacactcctggtttgaagaaatacagagtccctgagatcgtgaagcacttttcagcaaatacattttgttgcagtatgcatttacccatcttgttgaagggcatttaaatgttgtccaaatgtcttaagtatttcttttgaataatcattatttttaattatagtctggatttctctttcctcttttgtgaaataatcgtcttcctccttccttttggaaaagtcagtaatctgggtaatttctgctaaaaaaaagctctattaaaaccaaggggtgattgtagtccagttaatgaagcaaagcaaaaaaagatgaggccaggaatcatacggagttagtttactaatgaagcaaggtacttttaaaaggtaaggaaaaataaaggagcccctttcttttctttcgatctggtcattacctgggattttcagttaagtgaaatcattaactactcatatgtgcctcaacctaaacaccaaaccccaaagactatttaattatcatactttggttaataagattacaggaaggttattaaatgagtctgtgggacttgcctagaaaagatgaaatgcaaaatgaaatgttttcctctattgggaagaccacttggcttgtgttctttttaatggttgagcgtagtatcattctgtttgggaagggtgagtgtgggaaaattatgtacagtcctcagtatccacagggaattggttctaggacccccacgagtaccaaaatcgtagatgctcaagttccttagataaagttagtagttgtaagtaacctaccatcctcctacatactttttgtatcatctctagattacttataataactaatacaatgtaaatgctttatgaatagttgttgtactttgttttttaatttgtattatttttactgcttttcctcccccaattttttatctgctattggtggagtctgctgacacagaacccatgggtagggaggaccaaccgtactcattctgttcaaaacgtcttgcttaattcggtctgtttattgttacagtgtgtagggttttgtacttaaaaatctcttaaaaggaggatcaggagggttgtagtgttctattattaaaatatttttaataaaattttatgagaagtcttcagaaactgtgactgtgtaaaggttgaattgtctgactacatcatttgagtcagagtcctttttaaatatatgaccagttttaaaaatacagattcttccccatctctcccgggtaagtaaataaaaaatatgtccaccatcccctgctgcctttcgatccgtggtggcaggcgggaggtctgcacaccaggctgctctctctggtttgctgtgcagctgcacctgtgtgctggtgaaattttaattcagtattgtctgaagattgtcagcttcttttttttttttttttttttctcgagacagagtctcactctgtcgccctggctggagtgcaatggcgcgatcttggctcattgcaacctccgcctcccagattcaagcgattctcctgcttcagcctcctgagtagctgggattacaggcacgcaccaccatgcccagctaatttttgtatttttagtagagacggggtttcaccgtgtaggtcaggctggtctcgaactactgacctcgtgatctgcccacctcggcctcccacagtgctgggattacaggcatgagccaccacgcctggccacttgtccccttcttaatttaaaccacgaccaaaacagaaatttctgggttttgatagggaactgggctgtgtacatatgtcctgcagcatctgtttgtatgatggacgtccttattgactcatagtgcatttctctggacattgatataagggaattattgtccttaaaataatttattctaatttatagtaaaataaaagtatattttcatttggtatttagtttaatcagtaaaaaataatgtgaataaactttgcttttgacaaagtattggccttaaaagtactatttttctttatgtatttattttgtttatgtgtttagtttgaatgggtttgggtatacattcctttgagtcagttttcatggtgcagttatttgctagagtcttaaaaattcaagcaacaatttcactactagtctttgtatttcatttttatgtacttaaagggcagttctaaagtgagggagaaccccaaattactctctgcaataaaaaacaactggtaaactagaatatgattcagatagaggaaagccacagggttttagaattacaggcacaaagcactttactgtattttttttaaggcatgaagttagatgattttgttgagtaaagaagcagaattattccctgtgcattttatgaaatagagtcctaggaagtgttttcctctctagttaagggtgccatttaaaacaaacaaacaaaaccaatgcaaagtggtccacctttctacctttttaaaaaggaaaaatcgttgtaaaatggaacattgattctaaatttgaagatttatgtgttcccacagaaaaggaaagaaatcaccctcttgggaaacaaagaaacaaaccccaaacctctaacccaaatccctgagcttttgcggagacagacacagcttactccagaaagaagggtgcagctcagcatccctaaacactcccaggtgcgtgctctgcgacagagtgcgcaggacacggagctgcttaatggaaaccaatcctgcaacactgtacgtttagtcagctttctctgtcagataacaggcctccgtgcagactgttcaaatgatattttgaaaatatggtgttattccacacaactttgaggtgtgtaattttggagagtaaaatgaaatcaccggtcaggctgttaaggaggtggggaaatgccaactttgcctcttccgggcagtgctgtggtgatgcagccttgggccccgccagcagcggcttgctggctggcgcggggtcctctcccgggtccgctgcgttgcgcgggcaggacagtcaggtgagcacaggtggctccgttcacctgatcttcagccctgtctccactcaagtgtcttcttggtggaagcctggtggtccttagcagtactgggagtatttgaagactaggccagaagggcagggtcgctgtgtgagctgcgcttaccacctgttgaatgtgaaattgatacagaggtgggatgtgctggttgtttcttgaagtacaaataaatgggcacacggggctgggagcaactcgtgtctgatcttgtttatgattagtgttttgtttactgaggaatgtatttttaaaaagaaaatttgtattctttgtatttcaaaataaacataatgttggggtggggagcagcctgccacttctaatctcttctaagtcaatttcaccataacactgaccctatttttactagggtcagtaaatggactgatttctctgatagaataattttacatatacacaaatactcttaaaaatactatagaaaggccgggcgcggtggctcacacctgtaatcctagcactttgggaggccgaggtgggtggatcacgaggtcaggagatcgagaccatcctggctaacacggtgaaacctcgtctctactaaaaatacaaaaaattagccgggcgtggtggcgggcgcctgcagtcccagctactcggaaggctgaggcaggagaatggcgtgaacccggcgggcggagcttgcagtgagctgagatcacgccactgcactccagcctgggcgacagggcgaggctctgtctcaaaaaaaactatagaaaggtaaatgataattcagcaatattttcctcttttgcctgtaatgtctttaaacagttatttctaaaaagctgtgttataaaattttattttttaattttagaaaaagttttccagatgtctgtgcctgtgtctatttcttttctcttttggggcgtggtggggacgtggagggagacaaggtctggctgtgccacccaggctggagtgcggtagcacaatcacagcttaatcacagcacaatcacagctcaccgcttcccgggctaaagcgatcctccaacttcagccccccaagtagctgggactacaggcaggcaccaccacccccggctaatttttttgtatttttagtagagatggatcttcccatgttgccagtctgctcttaaactcccacgctcaagagatccgcccgccttggcttttcaaagtgtggggattacaggtgtgagccatcacacctggccgatttctttctttctttttgagatggagtctcacgctgtcgccaggctggagtgcagtggcacgatctcggctcactgcaacctctgcctcctgggttcaagcaattcacctgcctcagcctcccagtagctgggactacaggcgtgcgccaccacggccagctattttttttttatgttagtagagacggggtttcaccattttggccaggatgatcgctatctcctgacctcgtgatccacccacctcggccctcacaaggtgctgggattacaggtgtgagccaccgcgcccggcctcaatttctttagaagtattatgtagttagttatagtttattttggtaggttctgtttgttttagagggcttaaaagtcactctgttttgcctgcaccgactgtgtttgtgttgcatttttgcatcaagtaatgaatttagatttagattagggagtaacaaagaagtctgttcagtgatgttaagttttctctttctaaaaatcgctctactggttatcctaatcacatagttaatattttcattataaagttgagaagattactattttctctttctttctctgtgtgtattcgtggataatttcttttagaagaacagtcgtattctatgtactgtttttattatctacttggaaattgtaatttcttgtcaaatacagttagttgcgtaggtcattttaaatgattgcatagtattcatatggaataagcctgtttaagaaaatattaaagaatctaaatagactgtgtaactaagtgttgcttaatttagttgtcttttttgttatattaatctttagtgttcagaatgatacttaagcgtttaaaaaattctaagtagtatttatgaaaatggatcaaatgctacataaaatcaaaaccatggaagagtttgtttgttttgtaatcaaataaatctcctgaaaccaaaacaaacttctcctctcagtatatttatttgaaattcttcttgtttacagaaattgtgtaatatttatcttgcacaacagaaattttaaatgtgcttatgaggtagcagtccgagaggcaggacatacaataatctctagcatgaactatgcccacgtggcttaagtttggattctggaaacggttttctgttcccttttctttagtatgaatatgtgcttgccaattgtggaaaggagctgattaatcgcacttgaaggagaaattcttctccactgctcgtttgtttcagtttcagaatctctctgtcacccttggaagcagtcacaaggattctgccccttggcctgcagttgtgggggatgttgtccccagccttccccaaagcctgtcatcatggactcagctgcatgccttattaactcatcttgcaacctttggcttgtcaagacgatgagctgtcaaagctcgcagtgacatcagtagtatgtgacttgaatggatataccacatatgctgaatcagctctttttcattctctttgacatcagaaaagcaggtgctaagtctcattttgaaaatttattggtatctgttgcagacactttagagaccactctgtttatcagactaatagccaaagggaagctaatagagtgttttggcatttaaagcctaaaattctgctaatttcttctggaaaaaaagtcccgtcatccctcatgtgctgtgagaccacagaaaggctaatttaatattctatgtagggaaaatcaggataggattatttgagaaatttgtggttttaaattcttttatgatggcgtaattttatgcgtatactcaaggccatagaatgttatgtatgtgtataaaagttgaaagtttggaatcattgattttacaaaaaagaatatagattttaaaaccatctttttttgacagcttaacctcagttgaagtatggattctcttaatggaaaaaatttattttcattaatattttagcatgatttaacactaaggttattatataagtcttatatatgtgatctgtaaaggttttgtttgagatatttgggggagaatcagccttggttcttttctattttagcttgtaggaaatgaaaaatatataaacagtccaagtatcaatgtagatgaggtgctaaataaattgtaatgagcaccagaggacataagaatgtgttaatctcaaagccgcatgatggtttttgtgttgtgaaaggttagcttttcaattgtaagacttaattacctttcaaatgaatatttcatagagttactttgtcattgaatatacagctacataagtattctcttccctatgtcctgtatgttgtttatcagtagtttgaaatttagttatttcctctacttttcttttgcatagagcagctgggatcaagagtttcttatttttattttttaaacacagttttttaaagcttcaaaggaataacataattctgcagtgctttccctgtcattactttgttgatgcctatctggaatgtggttgcacagtttatttcattttctaaattttctaggcttgcccagggttttccacccttcatgaaggcacctgtcttcctccagatgtgcccgttgttctgaagcagctctttcttgctcagtcttctccactttatccttaaaaagtatggaaaatgggtgtcacttaagaaaagtcactgtttgttattcgatgactgctctgcctagtttagtaggcgttaactgaataaactaagtctgcacttaatccgtgaatgtgtattaatagttgtagaaagagtagattaaacacatattaagtttcaaataaaaacctagtggtttcaatttagggaaaaatttgttataatacaaatatgtacaaccattagtagcctctttttccagctcttttatatttaatgtggttttgaaattttggaacctaatggagaattgtagtttgctaattattttggggggcagtttgtgaacaataagatttttttattgttagctcgattgtccaaaagtcgtatttaaatatacacttgtactttattgcagactatgaaaaaatttattaatcattaataaattctgagacttttcagattagacttctgaaattttgtctttaagttgtgggcagtgtatacttgttttaattactaagatgtattatttgtgtatttacatacctgctttgcttttattttcttttaatgaagtaccagcacaaccacatgagatctctggcctcatcacagggaccacaagttctcatagagagctaagatatgtaggatgttttgcctattttcttttcaataagtgggactggcctttatctgtatgtactgctaatttatcattcaacaagacaggcccacagccaaacaaattctgattaaccatttcttgcttaacttgaaatttacattaaattcctataagtgtgcagataatacttcaatggtatatcgcagtcctcatatataagatttaagaaggcatactttaaatttttgtttattttctcgttttggtagtgtaaatgcttagaaccagcatttcaatttaagggaaaatcactacaatacagacataaataacttttcttttcttttcttttttttttttttttttttttttgagacagaggtttacccttgttgcccaggctggagtgcagtggtgcgatcttggctcactgcaacctccgcctcccgggttcaagtgattctcctgcttcagccacccaagtaggtggtattacaggcacctgctaccacgtccggctaattttctgtatttttaatagagatcgggtttcttcatgttggccacgctggtctggaactcctgacctcaggtgatccacccgcctcgtgctcccaaagtgtagggattacaggcatgagccactgcgcctggccataaataactttgtttttttgctttgagacggagtctcgctctgtcgctaggctggagtgcagtggcgcgatctcggctcactgcatcctccgcctttcgggttcaagcgtttctcctgccttagcctctcgagttgctgggattacaggcatgtgccaccatgcttggctaattttatatttttagtagagatggggtttctccgtgttggtcaggctggtctcgaactcctgacctcaggtgatccacctgcctcagcctcccaaagtgctgggattacaggcatgagccaccatgtcctgctataaataacttttaataggctctttttctggctttttcttttagtaactcagcccattttcttcttctcaatctggtctttgttaatgttgataacgctgtcttacttttaaattgccgtgattagaaattactagagatatataaacctagtcttttgggggattttgaaagggtcatagtattcttactgtctttcaaaatgtaccttatatttgaacattggaagatacgtgttgctgaatacaagttagtttcatacacacacatacacatggccacatacatacacatatccacacatacaaattcacatgcagtcttttcagataaaaatatttagcgatattaagacacaaatcaccataggaaatgtcattaaatagatatgaaaaagtcatgaagataaattagctgtcaccaatgaagttaatgattaatttggaaatgggtttttttcctcctgatgcttttgtcttttgactgattttcaatgctctgtaaatgatgagtgagagaagaggaggagggagagaatgtgtgtatgtttgtacatttggtacgtaagatttgtttcagtgcttttaagacagaagaatattaatttgccctatatattcaatttgaaataaaaatttccaatctgttatggtttaccttatatattatattcattgttattatcatgaaaatttaagctttagacttttctgaatgtatttaaagttatttgatcttattaatgaggtcaaattattattttttataacgtagacttatatttgaaacatagatgctgtatgaacctccttttgggggtttctgtgtatattgaaattggtgataagatttgcaaggaactttggttcattcagtagggagcccagttttaaattttacttttctttcagttaagtgaatttttgtcattgatatatgcaaagttcagatttgtgtagactttcggggtactgaatttgtttcctgttcattcagtcctaggaaggaatgtccttttctcctcttaggtcacacgtgacctttcccggtccctgtctgcagtctctttcctgcagggagctgtctccccttcatgtagccactgtccttgagctttaaccaagcatctgtaagcacctcacctggactcttaacgcctcacctgggaaatgattattgtaaactgttgttttggtaatactgtttggtagccagcattttaattttagtctattgtaaattgacacaaatatttgaatattttgttcattttgccattttacaaaaaatgagaaaggggaaattgagaggaacaatattagtgatgaaaatatctatatctgaaaaatgtaatgtaaagatatgaaacacttggggaagatgaatgcagaaaatctttagtctgaaattgactattcattaccccttagcaagaaagtaaatccccattgagcattatgttttagaatggaaaatgtaaattaagcctttgttttccatcatcattctcatcgtctttttcatgctctctggtggcagaaccccacccagctcccactgatttcagcttttgctctttggttctgtacatgcttttagaaatacccatatgtgaatggagtatcacccggagtctcgacatgctcatcaccttcagtggttataggattgtagtctgctggggttagttggatctgggtttgaattctggtgccaccacttctagctctgtcacctgagcaattcatttgacttttctgtttgttttgctggaaatgggagtcaaggctccttcctcacagggtcattgtcaggatcaccagagatcatgtactacagtgcctcagtgaatggtggtgatttttgttgtgaatggttactctggcttgaggttgtgtgctagctgcttggagtgaagggcgcaagcccctgggagcaggtctcttctgtgagtggagcccaggtggagaggtggccccagggaggtgctccacatgcgcacagttgcactgttgaaaaggatggctcacttccagtacaatgggttctgttcatgggttgaaactttcagaggctgaggatttaacttcaatttactatatttctggcaaatgcattccaggttccaaacaatgtgaccttgcaatggacttgagtagcataacttatttataaattattacctcagtggacactgagtaaagacatatcttgctgtttatgtctcaggagatttgtgtttgtgtgtatgtgtcgacaaagttctccagaaaatattccatatgaatgcaaatcgcagttcaaaatcagtctgttagtctgggcttaacttgtacccctttcagccccaggatcggtggtggtggttccctgttcagccgtgttgcatttgtactgcaggctctccccatgagtgctggtatctgtcttaagacaaccagctagaggaaggagtgcagtctgggttcagaacacacagcagaactcactgtttaagctactgaacacatggtagacatggcgagccacatttatttgcatttactgaaaagagatgtcacaaaaacatttaaaaccttctaatacaagaattactgtacatctaatatctgtagttacccaagagccaagctacttaaccactttcaaccttattccaatggtactagcttataactgttaatctagaactctagatgttagacttgattcatacgagctttatatggccaggggaacttagactctggaacacttattaaaatagaagtttaaaagcatacttcagtattacatcccaattttctaaagagaagacactgtctagtaacttagaaggctcaataatttcaatttgttttcttctgtcttgtttatttcttattatataatgctttttttttttttttttgcattgactggtatcaggtaaaccagcactagattaaagcaattcagacttgaaaattaatgtttaccttttctgtgtcaattagtgaactgtagaatgtagaatttgtatttaattattaagaataaaagctttgactttgttttttttgtgtgttttgtttgttgttttgttttgttttgttttttgagatggagtctcactctgttgcccaggctggaagtgcaatggcatgatcttggctcactgcaacctgtgcctcctgggttcaagcaattctcctgcctcagcctcctgagtagctgggattacaggcgcccaccaccatacccggctaattttttgtattttttagtagagatggagtttcaccatgtttaccaggctagtcttgaactcctgacctcaagtgatccacctgcctcggcctcccaaagtgctgggattacaggcatgagccaccttgcccagccaagctttgactttttaaataaaaaatttttaatcaaaaattgcttttgatttttgtcttttaaaaacagtttggcatttcactctcttctgtcacacttgaaatgtgctttaactatttaaccaagattactgagtctgctatgatgttgcaaattttggaacattaaaaacaatttgttcaaaactattttattcctatttcattaatactgccaaatttttatgattagtaaacaacactcaaaagagataattcttttaggttatagagcaactgtctgtgggtcattggaaaaggaatgcttcagtgcccagccttccttctgcattgctgtcccaatctcttacctgctctgcactcactgctgggctggagcaggtgactgccttttgccctctgaatgacagcagctgatgtttgtggttggagagggggcccatcttatgctggactcagttctctctcagcctagctttgccaaccctggatctctagcagggaagcagaattctccccagtgtgctgtttgcgtgaaagtataggtctgatcttctttgggtcctattttaccctctgctgccagcttctgcagccggtggagccctgatgctagtcacccaaagaaatgacaggtttactgctgtgtcctcattcatcttcatccttcttgaagttcacagttgatgaaatttttggaaaattctttataattaagagtaattaccagggaattaaaactgaagggtttttgtagatttggggctttggattctaaaagacatgaattcatacattcttgtttctgcttttactttccttgtggtcttggaaaaaatatgttcttttaaattgcagcgttatctgtaaaatgagcctgctttccttattgatagacagattacatgaaccaattgaacaaagagctcagcatagtgccttaatcaatttagtcccatgttcttcagcctcaagttatttatctttaaaatgggcataataacatataacattatgtaacagagatgttgaaagaactttgtgtgtgcacgcacctgtgtgtgtatgcagagaaaatatcctaactagatacattagacaactgtggatgggcttgggagtgtgttcctttactattgctatactcatttggaggcttaaaacaacatctgtgtattatttcatagtttctatggctcaggaatctgggcaggcatactgaattctctgcccagaatctcctaaggctgatatcggggtgtcagccggggctgtgatctcatctagggcttgtgggggttcctcttccaagctcctgtggttgctggcataattcatttccttgcagctgtggagctcatggcaccttgcttcctcaaggccagccagagagtctctctgatccctctttaaggagctctcctgcttagaacgggcctacccacgataatttccttttcgattaactaattaggggccttaattatatcctcagagtcccttgacctttgctgtataacatggtttaatggtaggattgctatcccaacacatttacgggtccttcctgcacttgaggctcgagcgccctagtgtttgtacccagagccaggaatcctgggggacatcacagaattctgcctacacacagagtgagcatgggctgggaaggacataggtttcttagttcatatagttctgtatttaaactttttaaaaatggtataatacataaaggttaaaatagttctttttattttacttggtatgagattcccccagaattctcaaatgaaaattacaagacataattctggaaggaattttagttaatgtatacttagtcacaatagtcgttctcaaacagtgtcaggagtggacaatcagaaataaagcaaatggtctaggcttgtgaccttatttagctgtggggcagggattggggccagccaaaggcccaggggtgtccagtggttgcatggtggcacctgtgctgagggctggacgagctgtccactttatcccttcccctgtgcccacagcttttgcttttctgagtgtaaaattgcacagatctactttattaagaatatttattttaattggattgtgtcacgttgatgaaggatttttctttagttaccagtggaagatgaacatttagtaagcatgtgaacataaatttggatagcatggtttgaaatcagaaccataagcacgtaatgcttttccattattattgattaaaataggaggcttcgtttctgtctcaccttttcagttaaaccctcattctccccttggtaatatgtgggattcaggtgtcagtcttttccagccagagagacctgcaggacttagaaatcagactgattacagttctgatgttcctctttaaaacaagccatgtgctaacaaaccaaccaccaaaaaggtggtcactttttagaattttgcttaaaattttccagtaaaaagacattttaaactttcagtttctttgtattttgattttattgaaagaaataaagttaaaaagtcatttcaagtgatactttggttggtatctgttaatagtgctgttgaggatagttaacacatggtagtttagtatgtttctcattgtattatataaaaccatatatagtagtttacagagtatagactatgtataacagactaatagtctcacatcatataagcaaaagcctaagactttgtgccgtgcagtacagtaggcactagctacttgtgggtattgtgcactcaaaaactggctagtaattaagggactgaattgtacatttattttattttaacaaattttagaaatctaaatagctacatgtggcagtcatgttggctcatattggacagcacagattatagaacctttttttttattttttggtaacagcgagttctttagaactgtgctggtgtacgcatacgtagtttataagttcctatcatgaagcagtaactgttaataaatgatctttgacagcccttctgattctcaaattctgtgccatatcgtttgctataaattactttttaatgcattttaatagcatatgtagggttattttacttgtgagtttctaagctgctcatcttctgcatgtcttttactgctatgcaatgaaaaacatttttggttattggtttaaacagaacttagtttttaagcatcacagaatttccatatcagatgggagttggaggcaaatgaaataaataaaagaaaattctatattagtttactttttagccctccaaatccttcctgctctcaggagaactgagacttgatttgtttgtcttgaaagatggaaccacaggcaacgcccccactgtgtccctgcccccacttatttttggttcagtttgacttaccaatttatttcaatatttaccgaatttatttaaaaatttcctcaaagacatttattggcatatatcattctgattgtggtttttccttcttcaaaacctcttgattgttcaggttagattttatgtgacctgaatagaagttctctctttgtctgaaaactttttccttgtggaatggttttctacaacattttgctaggctaatttaggtgtgatttcccaaagggcatctgacttgaaaacattattcattcaggtctgacaatgcccaggattttaggagagagaaagagagagactagggaagaaatgaagtgaaaactgtagtttagttttggattttgagtttttactatttatatttcatttatatctgtgtacattttatttttttaatagcctgaataaagatgtgcaatttaaacaagttcagattgcctacagttcaggatttttaaaacacgtagattattttgggagctttatctttataaaccttgtaataacaaaaccacgtgagtaccagaatcatttctcttacttagtttcttgcaagggaagcattattgactcttctttttgcagcaaaccaacatttaaaacacattgaatgataaataagaaataatcttgtttggttaatgtacctgaaaagccaattgtgtagaggtaaagaggaaactgttgtaattttgtttaagattggagaagaagagaaaggttaaattgttccttgaaaacataacgcagaaccaaaaacccccacatgtactctctgacatcttcttcacacaagacatattttatattaatgaaattcagataattaaaaatccaagtgtaggcatagaaaaatctttactttttcttagatactggcagagttgttttaactcagtgagaagcatcacatggaacaatagaatttattagctgtttgttaaattgttttagctgctactaaaatatatgctttcacttatcagaacttactttcaagttccattacatccttcacatgcagtatatgaactttacagcagcacacactgtctctcccttctctgcctttttgctgttgttgtcatacattcagtatctcaatattttataaacaccactacacatatttattttatctaccatttgatggccatttgggttctttccacttttcagctattttgaatagttctgccaggaacagtcatgtgtaggtctttctgtagacatattttcagttctcttcagtagatacttagaagtggaatctgctgggggtgtgtgatttttgtgtaacatttgaagaaactgccacactgttttccaaatgactgaaccattttacattcttataagcggtgttcctctccacacctcaccagcacttatcttttgtcttttgcatcgtggccatttttgtggatgtgactggggttttaatttgcattttcctagtaatcaatgatgtgcatcttttaatgtgtgcattggccatttatacaccctttttggtgaaatgtctattcaaatattttgcccattttaaaattggaggagttttgtcttgagttttaagggttctttatatatcatggatatgcatcttttatcatatatatgatttgcagatattttctcacaggctgtggtttatcttttcacttgcttaaaaggtgtcttttgaagcaaaaaaatacctttaattttgctgaagtccaactttaccatttttaaaaatcacttgtgcttttggtgcgaaactgcctcattttcaaaagacatttttttccaccggatatagaattttagtttgactgtattttttttttctttttttttttttttttcagttccttaaagatactggtccactgtcttctggctttcattgttttggcaagaagtctttttaattttattgttcttgatgtaatgtgtttttttctgactccttttaagatttttctcctcttccccccatctttccatgccaccacagtggtgcatgtcacgagcgtccatgtgaagagaccaccaggcaagctttacgtgaacagtaaagcttttttatttcacctgggtgcaggcgggctgagtccgaagagtcagcaaagggtgatgggattatcattagttcttataggtttgtgataggcggtggagttgggagcagtttttttgtgggcagggggaggatcttacaaagtaccttctcaagggtggagcgggtgtatcgtacaaagtacattcacaaggacgggggaatatcataaagtacataagcgcaagggctgggagggggtgtattgtcacaaagtcaattgatcagtcagggtggggcaggaacaaatcacaatggtggaatggcatcagttaaggcaggaactggctattttcacttttgtgaatcttcagttgcttcaggccatctggatgtatatgtgcaggtcacaggggatatgacggcttaacttgggctcagaggcctgacagtgcacacggatgtcctggctgacattctcaagagcatcaacaatgccgaaaagaggcaaacgctaggtgctttttaagctgtgctccaaggtcattgcccgtttctcactgtgatgatgcagcacggattatgcggggtggagttggggggacttcctgggccgggggacttttgcaagagaccccggtgactcaggattttgagttcttaaccagtcgagtgaaggattcaaaattaaccactccaagggaggattgaaaaaagaaccactctcagtggacaaaaagaaagaaaggggagagggtaacacagggatataagccctagtcacccgagccagcaacggcaacccttctgggtccccttccaccacgtggaagctttcctttcactttgttcagtaaactgcgctgctgctcactctcctggtccgtggactctttttaagctgtaacactcaccgtgaaggtccgcagcttcattcatcaaagttagcgagaccacaaacccatcggcaggaaaaactcctaactcagttacattggcaaatttgaaatcattgatgatcacagagctgggaaaattgttgtgaacctcacaggcgggctaaacaagtgtggagtgatcagcctcagatttgatgtgcaactcaaagatctagaaaaatggcagaataatctgcttccatcctgccagtttggtttcattgcactgacaacctcggctggcatcatggaccataaggaagcaagatgaaaacacacagcagggaaaatcctggaattctttttctagggatgtaatacatatttacaaaaaaaaaaaaaaaaagatttttctctctccttggttttaagaaatttaattatgatgggactggtgtggttttctttgtgtgtcttttggttgtgttttattgactttcatatctgtagatttacagtttttatcaaatttggaaaaaattcaagtcagtttttttcttcagatatttatcctgtctcctctttttttttttttttaaacagcagctctaactaaatatatatattagacctaccctgaagtctctttctctttgtgttttatttttcctttgtgggctgtgtcttcaatttcaggcttattcgttttcatttaaaaattaccattaaatctatccagtgaaaaagtgaaaatgtattttttacatgcatcattaaagtttatagctttagaagttcaatttgggttatttgatttggtttccatatctctaccttaagatgcacattttttctatattttttgaacatgtggaatatagttacactaatttaatattgttgactttcagttccattgtctttgttgttctgtgtacatttcaattgactgatttttctcttcatttggggtcttttgtttttgtttgcttttgtttttgtttgcttctttgctttctggtaatttttattgtgtgccagacattgtgaattttaccttgttgatgactgggtatctttctttttattcctataaacatccttgaactttagtctgggacccaggcatattacttggaaacagcttgatccttttgggtcttactttaagctttgggaggtgggacagggtaagcagggtctgcactgattctgcccacttttcgggcagattcctcccaagggctctgcgtggttttccctctctggcgggtgggagcaggaactcttctgtgtgagccctgaggattcttcttctaatccttttgggtgcttctttccccatcctcacgtggtttcttcacacacacaggctgaacgtgactctgccgagtatgggagggaagactgccaataccaggagcgttcttgttgggtggctttccctgtctcttacgcttccctgaaaacaccatcctcttattgacctctgattcccagctccatttccagactctgcctggtttctgctcccagcaccttggcctggaaatgtgttccaggcagtttgctggggcagtcagagggttcacctggtttgtttcccatctctcagggaccaagatccttgttgatggtcagtgttttgaaaatgattgcaccacagatcttgtccagatttttatttctattttttaagggggaaataaatgcagtccctgtgacaggaatgaatattaggagaatagaatctaacaaaagggaaacaggattttgatttcttcatagctgttatggacagaatttgtgtatcttccttgagttttgttgaataaacatatggaagtccctttatacagtgtagaatccatctcatcaccatgaaaacctttgttcttgtgtgatataaattattagagactgttttgtgtcgttatacagaagttatttttagtatgttgttttgttaggtgggtctttacttaaaatctcatttagtttcatggtagagtatctttgttagtatgattcaaaagagaatataatttggggttttattagtgtaaaaagaattaccataaactttactttccagtagactatatttaaatgtgatatattactttttctagccacatactcttttagccttcaatatagcagaatcaaagtatgttattccatttgttccaaatttctctccattttctatccagatggctgctgactcaaatgtatatgataatacatttacattttttcagttaaggctgataaatccattttaatgctattgaattgcttaatgaataaaagatttaaatgtgtcgtcagtgcttatgtttctgtaaagtgaagtatcctgaaagcgctagtagtgctgataaagtttccagattgtgatttaagaacttttctgttttgcagttctgttattactgtttctatacttaccaggtgacagagtcatttgaaagttctcagttgacaaggatctcaaccttgcaaagaatatatatattgtgcatgtaatacagtacaaatctaaagtaactgctgagatgcctaggtggaaacttacctttctaggtcaggttccagtgaatcttgttttccttattcagaatatggtgttaggtgaactgactcagctttaaactcttcatatcctgccatggggagaaattacctgccccagtgatgagtttgggaggacaggacaatgctgtttatattccttgctgctgtgggagtattggaaattactacttgatctacctgaatttgagcttggcagtggtccagggacattagtgatttgcatgaaatataaacatgaattatttgaatcagctgttgctgttttttttttttgagacaaagtctcgctctgtcgccaggctggagtgcagtggctccatctcagcccattgcaacctccgcctcccaggttcaagcgattctcctaccccagcctcctgaggagctgggactgcaggcgtgcatcaccatgcccaggtaatttttgtatttttagtagagacggggtttcaccacattggccaggatgatctctatctcttgacctcttgatccgcccacctcggcctcccaaagtgctgggattacaggcatgggccactgcacctggcctgttccttccttttttaaaattatttttattttttgagacagggtctcactcttttacccaggctggagtgcagtggcgtgatcatagcttggctatggctcggcttcccaaagtgttaagattacaggcatgagccaccacacccagcctggtccttccatttaaacattgattgtaatgtggcctttccttttttgccacctaagttaaaagactttaaggaaagtatatgtaaaaatttagcatttgccattaaacattcattaaaattttttgtaatgcttagatccgtagtcatagtgtcattgtaatttgctaagtatatgtggaaaagaatcattgaaggtcgggcgtgatggctcacacctgtaatcccagcaatttggtaggccgaggtgggtagatcacctgcggtcaggagttcgagaccaccccggcccacacaatgaaaccccatctctactaaaaatacaaaaattagccgggcgtggtggtgggcgcctgtaatcccagctactcaggaggttgaggcaagagaattgcctgaacctgggaggtggaggtagcagtgagccgagatcatgccattgcactccagcctgggcgacaagagccaacctacatctcaaaaacaaaacaaaacaaaacaaaataagaatcattgagctcctttctgtgtgccagtcaatgtgccagtcattggggatacagagatgaaaccacgcagtgcttttcccgtaggaggagtccggtttagtggcagggctactcgtagacagtgccgtgtaaaatcgcctgcactgttgtggctgaggatctgcaggagcctgagcagggatccctggagtggagggacggcctttgagacagtggagggacccgtgcagcagcccggaacccggcagtctggggaaaggctggcagctttcaatgtacccaggagctcagatttcagcctgaggcagtgaagagcccttgacatacagaagaatacacagatactggtttatatttttagggaaaatcttttattattttagggagggtcacagaaattaagtcattttcacttgttggaagaaacaatttcatgataaatctagttagtgtttattttgttgtttacattgtagcataaacatctgtgtaatcatggcaggtaagtgaagccactgtttttgttggtttaactcatgacttagcaaaaactggaaaggtatttcatttcttgagacttgtagccactgtcctcccttgtctacttctgagggtgagcagtgctggtgtgactgttagaaagcactgacttagtctcttcctctaagattgctccaggtccacatgacctgtgggcaggatggatgattgatgtctttcttttgaggggtggtagtgaagtagagcataggggattattaaccacctaggtagctggatcaggcaatggagagtctctgccgttcttcacatcgagtatatagaattaagcattcagaaacaaaaaggagttaaggcacatatatccttttctcctaggataaactgtaacccaggtcatctaagttttcaaaaatagacaaaatttaggaatgtatgatgaatttatagatgatgaaaatcaaatgaaattgtcttgttacatgtatatttctttagaaatgtacatatacatgcaatcattgctatatattatcttttaaattcctcagtttggcatcatttactggcttcctattagatgaggattgtagcttgctgtacactgtgtctttcccactcttcaatgtcctacccatctaatcccatcaggttttggttaagactgcattactgtttatgttattatgtcttcttaactcttgttcactaagctaaatattgcattatactatacttatactgtaatactataataacttagttttgcttggagttcattacctcgtttttttttcacatgcttttctttgaacatctgactgggccttcctgtgccctccaacaactgggcagtgcagtcttcatgcggtcatacctgccagagaagtttttcagctccagtattttttcttaagagacatcccttctggatttccatagtcttcaccacaatttggagtggttgttaacgcaggagatagatgtgtacagccatctcctgggatgtctctttttttttttttgtgactcttctgtttgcctcatgtgtggatctcccgtttcctagatcacttaccattttgactgcgcacatctttcagtagcttcttgagaaaatgtgaatgggaggtaaattttttagaccttgcatgtttcaaaacacctttactatataccctcatatttaaattgattgactacatatagcaatcctgcatggaaataattttctctaagaattaaaagataaaagcttctgacttctgctattactgctttctgatgtttcctgttgctgtggagaaattagatgccattgtgacgttgccctttctttctgtgtgatcctggaaactgttagggttttcgcctgtgatgcccgaaatagtgctgtgtgtctctatgggtcttttttttttttttttgtacttcattgtgctgggcactaagtatgtactgttcttcattttggggcaattatcttatatagttatttggtaatttctttctctcccttaatctgctttcttattctggtgctcctgggtgttggatatactggatttattgatcttttctttccttcactgatttttcttttctgttactgttttctgcgtgggagataaccttgactctatctgccaatctgactgttaaattatcttgtttttctctttatattttttaattcaaagtgtttttctttatacatagttccttttttaatagcattctttatttcctgtatgcaatcacttttcctctctcaagcagcatgttattattttttacaatgtttcttctattccttgcattatctgtttcttctgaattaccctttttactttttacaatctgttttaggcaggaggcttcctcaaaagtgtgagaatctttgttcctatttaagagtgaggtgcattaaagggctgattggtagtggtgcgtgcctgtaatcccagctactctggaggctgaggcaggagaatggcttgagcctgggaggtggaggttgcagtgagccgagattgcacaactgcactccagtccgggcaacagagtgagaccctgtctcaaaaaaaaaaaaagaaaaaaaagaaaggcctggcacagtggctcacgcctgtaatcccagcataggctgagatgggtggatcatgaggtcaggagttcaagaccagcctgaccaagatggtgacaccccatctctactaaaaacacaaaatttagccaggcttggtggcaggcgcctgtaatcccagctactcgagaggctgagacaggagaatcgcttgaacccaggcggcagaggttgcagtgagccgagattgtaccactacactccagcctgggcgacagagcgaggctcagtctcaaaaaacaaacaaacaacaaaaacaggctggttggaggcctcctgtgtgagctgggcatgtggacaggtaggcatttctttggggttatcatgtgatcagccagctttttcactggggacttcctcatgttgatatgtgaaatatgctcaggagtagtttattttctccagagaagacactggtcgtgttctgcttggaggacatggtgggtgaagtctaagcctggttgctgacattacggggctgggctgaggggcttagggtctcagtgttcggtacttgctgttaatgtactgtgtggccatttcacaaaccacctcatccgtgtgagccctactcgtttctggtttggtgtctacaatggaagagggatgatggtggtcagatgctctggctttacaaactcttgatttaaatctggttttggtctggtggtctccagttcttgagctgttcaggttataccagctgtgttaatttgttccttctagttacccgatttcctgcacccctcagccagttaggattgaccttgcttttctcattcctgtgtttgctttccatctacatatattgttagcactattgtttccgtttacaaatcacttcaaaacttcattttattaaaacaatcattttttttacctctccccatttcttgggatcaggaagttgggaagggtggggttctggctgggtttcttgcacctggttgtggacaggcagtggctggagttcggaggggattcgttgagcgtctccaggaggtatcaggacaaaccttggagatgggaaacagcacagcaaggcatgctcccacagcagtccggtgcagctccagaatgagggagccatggcaggggcattagtttaataatcattggaactaattctctttccagcttctccttggacctcttcacatttctacctagatgtctcatcagaatggaattttcagatccttccttctgccccacagtgctctttgccatgctcttttaaggtaccagaatactgggaaaaaaagggcgttctggataagtgaaaatgtcctaggacctgcttggtgtttactgacttactaggaagttgatagtgaaatgtgaagggttcatgacagtgacttggtgttactagaaagcaaaagtaaagtgaggaacacaggaatctacaagtgctgggtgtggggtagtgggtggggtgcagttgtgggtgaaacttcagtgtgaaatttggaatcagaacatttagctgagtctaaatggagtttctttcttttctttcctttcatttccttttccttttttagagagggtctcgctcttttgcccaggctggaatgcagtggtgcagtcatggcacactgcagcctcaacctccctgggctcaggtgatcctcccacctcagcctcatgagtagttgggactacgggcatgcatgcaccaccacatctggctaattgttttgtattttttgttgagacggggttttgccctgttgcccaagctggtcttgaactcctggactcaagcaatccactcatgtcagcctcccaaagtattgggattacaagtgagagccactgcacctggccagtactttattttcatacagagactgagagtaagacttcatttccaaataaaagtaggttattaaatattgctttatatatttttaaagttcttacagaaagaaagcttccatatactctagaccattttgagattctttcaggctgtgactcttaaggtcagctacatttttattgacagcaatcctggaagaaaagtaaagagaagtgagaatataatgttgtgattctgttaaaatcactcaaaatgcttgaaattgataatactttttggcatgtttctttctaaaatcaatgtgataatatccgctgcattgataaacatagttagcaagcatttttgtacttagcgtttgtgtataaaatgtaaaggaaggttttttaattcagagaaggtgctcatgtttgaaagacaatatatggatctggaagaagtaaaagtaaatctttaaactctaattgcaaggctgtctgctcatatttaattgacacacgtttaaacattggttgtaatggattgtttgccatttaactgacattaacgacctcagttaactcatgtttttatattacattggctgtttattttttgttaatttccctttagtgttcagcttcccatacattaaaagttttgctttttataaacaactactgtgtcttgaatctctttttattattaaaactttcacacatgtattgggtttaattgcatatactttttgtagcctgaaaatgtgaaccatatgataataaaacttaaacgtctgcacattgctacaaaacacagctctgtaagggaacacatatctaaatatcatcatcctgtccaagtcactctcagagatgtgactgtgccctgcctggctcatctcggatcaggacaacgcctgcttctgggtttgttggatgggaattaaaagcaaagctgaagcagaacctttactgctttatttcgagatgtaatgtcctgttgcaccgagtaattttcagtaaaagtattcctgcctcctgcgatttttctgtcagtttttgttaatttctggcaaaattcctttacttggaaggctttttgtctttgatctgtgaggattcacagaggaagggaaagcgatctagggaggatctctagctcttccttttggagttacctaattttcatttttatcacttacctgtcctcaggtgtcaaggcctcaggactggttttgttagtcactctgaccttcctctcagccccttcacttgttaagtagataacacctgtatgggaaggtattggatttttaattattagagggacacatcctctttcttgaacaggcttgtagctaattgttattaaatacaaaatttcatttcagttttaatttctgtttaataaaaagctttttaagtctccaaagtttgtctaattatttttaagcttattcaaagcctgaaccccctgcacggtaaaatcatcagcataagagacagcaggggctggtagttaggcccttgcgtttgaatctggctctgtcactcggtcagcttgtttcatttcttgtgcttcagtttccttacctacaaaatgggacaacagaacttatgtcttcggtgaagattagcacgtgatgtgcttagagcattgcccggctcatagtaattactcagtaaatgcttgctgttactgttgctatgactattattattaaagagctttcgatacttctacacagactacagtatagttatctggacctaatttttttttaaggccaatgctaccattttaaaaggaaactcagctgtcagcataatggtagtaaagtggtagcaaaatgatagtaaagtgattaaacaggattaaaacacaaactggctgttcattatatgtactttgtattaataaaacaacataggccgggtgcggtggctcatgcctgtaatcccaacactttgggaggctgaggttggcagatcgcttaagcccaggagtttgagaccagcctgggcaacatagcaagaccctcatctctacaaaaatataaaaaattagtcgggtgtgatggtgtgcctgtcgtcgcagctgctcaggaggctgaggtgggaggatggctctagcccgggaggtccaggctgcagtgagctgtgatactgccacttcactgtagcctcggtgacagagagagagagagagagagagagagagagagagagaccctgtctcaaaaaattaaaaaactaaaagcaaaatataagatggggtcacctgtttttcttccattctagagagataattacagctaatatttctgtttcctttttctagtcagttttctagataccagtgctagttttttttttttttgagacggagtgttgctctgtctcccaggctggagtgcagtggcacgatgtccgctcactgcaagctctgcctcccgggttcgcgccattctcctggctcagcctcccaagtagctgagactacaggcgcccgctactgcacccggctaattttttatattttcagtagagatggggtttcaccgtgttagccaggatggtttcgatctcctgaccttgtgatccgcccgcctcggcctcccaaagtgctgggattacaggcgtgagccaccacgcccggcccagtgctagttttgtgcctgtattttctgcttttttcatttgacatcacttgaatttccttagcttgtggaatcttttgttttgttttgcaaacttaatatattctcatacttgatagttatagtaatacataagctttagtcattgacaggccccattagcccttgtttatgttatttacccttcagagtatcttgctcgaatctagaatcgtggcctgttgagactttattcctttgagttgaatagtacctttctgtactttctgtaatatgtttttgaatatacatatgaaatacaatgcaagtaattaatctatagcagataataagtgtgtgcatgatggtgatgttggggataatggaatatcgtggaaatggtcaatatcttagtctttctttcattctagatgcttactgttggtacatataggcaaaacactctaaaaaaatctgatctattggaattcagatttgtcacaactagttttagggtgaaggtagagggattattgttcaaggatttagctggagacgcacttagtagttacaaaccgggagcttgaagggtgagaagggagtttaaggggataggataaaaaacagaccagtaatatgctaaataatgtaaacttttgggccagtgacttaatttacatatgcccaatttgtgtggtgtttcaaaggaacacttctgttttaagtgaggtgactcacattttgtactgtcttcattcatgcatgtgtggtgcctgcagcctgccactgttttttgtgcttatctcaggggattcgctgcaaaccatggtgagggggaggggaggaacggctagtgcatccatggagtccttctctggcttctcctggccactccttccatagtttaaatgggggcagcacatcctcttgcttctactaggaagtgaaaagtcttactagcaaggagttaaggactgccagaggagctttcttacctgccagctctggacatctcatttcctgtttgtctgaatgcatgtgcaagcttaggaacttgcccactgcagcatccaacacagctggtttgcctgtgtttcaggagagtggggaagtgcgcttcaatcacttccgacacacttcagcatgttgagccatctgatagggagggacattggtgcgttttactgccttcttcctatgcacctggagcttttgttatctcaactgaccagttccttacctgtaacctggattagggaatggcagccagtattcatgacagttgcatatgtgcgttcttacaatcagagaaatgtgccataaaaataatttctcattttttgcctctgtgtattctgctcctgtagcttggacccatggccacattaaggccatgttgtcacagggatctaccatactctattgacttttcttgtgttctgccatcctgctcttacaacacagagagctgagagtgttgtgatctcctactcccattctttgagctcccttttggatttaacttcttggccatgtttatcatattttattcgtattactcctgattatttcactccctggttgctttgcgaaacccctctaagtcaggtcagccacactatgtctctactcccacgtcttccatgaaacactgctgggacaaaatttcacaactttggctgttggcatttttgctacaaaggatcgtcttatgtcctggtggtcaaggtgaagtaggattatatctttttgcggttatgaagattccaagcaaaagagaagataatgatgcatttaacagtcacaagataatacatgttaatcttcaaaaagttttgggaattcgtcatagctgtactatacaaagccagtgtataaattgaaattctaaagttttactcaaaggtagatagtcattaagtaaggaccctgggggtgatacatatttggcctttaatcccaattgggccaccccatagttgtgtgactgtggccaaattacttaacatctctaagcctcactttccccatctgtaaaatggagatgataatctaccccacaggctagtctgaggagtcagtgagattccccttgacttcagtattgaaattagcaatgtttgctgatttattaagtgtacatccaataaatgccttgtcaagagtgctgatggcggggatagttgaggtgatggtgggagtggcagtagcagtggtagatgtatgttacctcccgggtgatgggagtcttctgtattgctgccatgtgggagaatgataggaaatagtgatctcatatttaatcagaggcatctaagcttatggttgatacctttgatataattcttgccaattaatttgattttcaacctttacaatgaataatgtaaaatttcttatacagaaagtatttaattcagtgaatacttaggagcacatgttctcttaccggacttactatttggggagcaaaaatatgaataggaagtggtgtttgtccttagagaacttgagatccagtgagttgtagagtcaatggactggttacagaacagatttccttaactttttttttttttttttttaaagagagtctcattctgtggcccaagctggagtgcagtggcagcatcatagctcactgcagcctggaactcccggctcaagcgattctcccacctcagcctcttgagtaggtagggctgcaggcacacaccaccacaccgggctaatttttcaaaacagcttttgtaggccgggcgctgtggctcacacctgtaatcccagcactttgggaggccaaggcaggcggatcacaaggtcaggagatcaagaccctcctggccatcatggtgaaaccccgtctctactaaaaatacaaaaattagctgggcgtggtatcatgcgcctgtaatcccagccactcgggaggctgaggcaggagaatcacttgaccgagggagttggtggttgcagtgagccgagatcgcaccactgcactccagcctggcgacagagcaagactccgtctcaaaacgaacaaacaaacaaacagaacatcttttgtagagacagggtctcatcttgttttccaagctggtctcaaactcctggcctcaagccatcctccttcctcagcctcccaaagtgctaagattacaggtgtgagcagctgtgtcaggccttttcctgacataggaaccttttaacccttggttttattttatatttttgctctattgcatttactaacaaattaagtatcataaatggcttttcatggtgaatcatatttcacagccaagatgattaataattataactataatagtaacaacaactaacattgattgagggtttacttatgagctaggcacttttgcaaacattttacatgtattaactcatttaattttcatgacattcctatgagggctgttattagtcttgttagttctacttcctcatgaggctctgaggagcagtaacttgacttgccgactgttgcacagttggtacacatggcagagacagtttcaaccctggcagtctgggcctgcagatgctagcctgtctcttgtgatactcattgggaaatggggatgcatttctttctttttttgtttctgtttttgttttttgagacggagtttctctctgtcgcccaagctggagtgcaatggtgcgatctcggctcactgcaacctctgcctcctgggttcaagtgattctcttgcctcagcctcccaagtagctgggattacaggtgcccatcaccatgtctggctaattttttgtatttttagtagagatggggtttcaccatgttggccaggctggtcttgaactcttgacctcaggtgatccacccacctcagcctcccaaagtgctgggattacaggcatgagccactgcgcctggcacatttctgtattaagctaggattgtctatgttattgtaccaaatcagaattagagaaatgttgaggggaaaagttcatacttatatctttcttacactcttcttgaacttcagtaaattaaaggatattttcctgaatacattattaaggtactgatttttaatttattttaattaggaataattggaacttagtatgttttcatacacatagtaataaattattctaaacgtcctgagttttttcccaaacatttcagtatttcaaaagttctattgaaatgagatgcattatctataaactgccctttattttgtaccttaatttgcttctccaggacatgtttgttcaagtgtatatttaaaaatttttaatcttgaaaattagccaaagatatttaacaaatttgtaatcctaatttaataacaaagaaaacatttttgaaaagtcaataaagtttacaaagatctcttgtcatgaactcttgttatgtctaagtaaccttagacataggcattattttacagtttacttttctttccagtagaaatattttatggagagtgtgtaatgtgtatgctatgtatgtcatgtataataactgtacagggtagtatgtcaatgcagattgcactaagctaacattttagctcttgggtttctgtatttcctgctgtgaaatattaactagttgtagatacagacatgagtgtgcttgtgtgtgtgttgtagtccttcatctgggaaagctattgggtatcattgcagttcggttgctcccttctaagtttctgaggttcatggggaaaaaaataacatgtaactgttatatgttaatatctcgtcatctcccaagtaaaatataaaaagccaattacttttgagttattatcacagcctctgaatttagaagatggttaatttgtttttagtggttccacagctttgttctaagatatgtgttttcagtgttcgtgagcatcttcgtgagttttctgtttgttttccttatcagaaaaggcaccccgggaatggaggggacagacggctagcaccagggccgtaggttttggagcgggaggtattcagaacggcctcccatctgtggggcctgggcactgataaaacttgcagtggctgtctggcttctccagagcagccgtggcctgtttctgcgcagaggtcactgggccttggaagactgccctggctatggagcggtcccagtgggttgcaggcactgtgcggtgggcaacataagggtcagcaccaggcacagcattggagggagccgccggctgcagactggattgcctagcacctctctgtcactctgcagttagccaagtttatgttttggatttaaagaaagaaatcaactgtgatttaaaaaaatagtattcagtgaattaaaagaccttgtaaatcagtctaaaattcagatgccttctgtagggagctgaatgtttatcaatgagccattttaggccataattgtatatatatgctttcgcttttttttttttttttaagatggagtctctctctgtggccaggctggagtacagtggcatgatctcggctcactgcaaactccgcctcccggttcaagcgattctcctgcctcagcctcctgagtagctgggattacaggcaaccgccatcatgcctggctaatttttgtatttttagtagagatggggtttcaccatgttggccaggttggtcttgaactcctgacctcaggtgatccaccagcctcagcctcccaaagtgctgggtggcgtgagccactgcgcctggcacattttaaatatatctaatgagacctacattcttattgtaacgaaggataggggaaatttctttttggcctcaagtttttagcaaaagtattctgctagctcagtatggtgattctgaccacaagcagttatttcctattttgcaagatgtgtgtgtaactttatatattagtttacagatagacgtgatgcttggataacaaaatatattagacctttaaggctatgatattatactattttagattctctgaaatactgatttttcagactggccattgaagttatatacctaaggatagtgccaaacaacaatcccaactttcaaaattttttgaatgtagtaggaataatatttattccattgacaagcatgggtagaaccattgctctttagtaaaagccagaaacaaaacagtcttgtttctttttgaagtagcctgttgacttgttgctgttaactcttaaatttctgttgataaatatggataatatgtccaaaaatttataaaaatcaaatggaaattttaagtttatctcttcgtaaaatatatgtctatcaaacattttgctgaataggtaatataaatatcaagtggcacttattcaaattataaaataaatacttattgaatgtgtcaggctcacagatgccattgtaccataacagaaagcattatgtaggaacgtgaagtttgtcaggtatgtagaaattgagatgcacatttttaaacttttggtcattttttttgttcatgatttctgtgcttgctttttccataagtacattttaagaatacttgatgcagtgagggtagaaatagtgactgatttaaaaagttttttgcccttaatgaagggttagaatgggtcacctatttacagtccctgtagatccttgaactctgtttaccgtgtatgtgggtctgcgttctctttcaataacaagccattttcagtcagatctgactgtatacataggtggcagacagtcttaatgcagaaagcgctaatgggttttaaagcttccagcatactctctcagcagtttagattccagagaacgccctctgattgtttccggatctccatagaagaatttacgaggctccgttattgatttacttcctccaaaaggaggaaatgatacttaaaacaaatatacaaaaaaaaatacctttataaaatgcttttcctaggtaaaaaccagtcctcattcctggataatcagaggcagcttaaaaaaaaaaagcaaaactattttgaaaacatatgttaagtctgtagggtgaacgcacgcccattatgggcaacctgatctgggccatcccctgtgctctgcctccaattctcaacggttccctccagtgtcagtgacatttagtaacctgtccaagaccagacagaagactcagtccagcccagggctgcctaggattgtcctccaccagtggacagaccagtggtctctgtgtcccggtgtgccctcacaggagtgcctggagaggttctcttaccctgaacacggtgtcactagctctcccagccatgcaccagtgcctgccagaacatgacggttgggttattcttactgtcctcccctgtcagctggggctgggtggactgagggcagaagagtcagggccacttaccaagacttaggtctgagcagactgactttgcaggggcccctcttgcacccctggaatgtgaggatcttcagcagaggaggacctgcaccttcctaggcacgtctgtctctgaagagggccctactggtaccagaggaagtggggctgtgccctcttctcccgggcttaggactccaggtgtacctgaagacagacggtaggaagcctgaggtgacgtacgaatgagcccctgaaaagtgaatttcattttcttttcttattcactgcttctcactgaaaagaactctgtttacctgaaaggtacaaaaggagccaaagagaaggtagcaattttaaatagctgacctgaaccttatttttacaaaggacctgtacagtgtcctgacttaggaacctgctgattagaattctttatggacagagattgtcttgaataagtaggagagttttggtaactcttctgagcaggctgccttccaaggattaagtatttgttgctgaaaaccatgtggtcatatagtgtattctaagtatctgttttgctccaagcccagggtactgtactaggaactgaacaatttgggactagatcctcaagcctgctacttagtaacctttttgagcttctagacttcactgacatggacaagtgcaagtgagaagatgtgcttagtgacagagtgcccaaatattcaattatcgtcagtgctgtaccagctgctattaagctatcaccagatgagatggagaatctgcagcctagtaacgtgtttcatgtcattgatgtggaagtagaattaccagataaaatacaggacgcacggttaaatttgaatttcagataaacaaggaataatttcctagcttaaatgcgtcttatatattacatggaacatattacataggacatgttactcaatctggcaaccctatagaaaaagaattcacttgagtgatgagaagagtcctctctccctgtgatataagctgcggaaaaacctcaggaccccacacaaaattggaatgcttatattttagctcccctaaatctttaaactcttcaacagtaagggctaaatcctttgactctgtagcaaattcaagcactgtgtgaataatagaaatatcttctatcctccaaaatcttaatttttcttaatttttttcaaaagcttgggtggtaaggagtaatctaagccacaggctggatgctgctattaggttctctctgcaggtgttcgcaaaaactgtaaggaatggcttcagagctgagctctaactcaagtaaggatttcttttcctgcagcgaggtcatgtcttgatgagactctagggcaaccagatgggacggagtattctgaaatgtccccagtccctctgaaagggaatcttgtaaaggcatcctcaacaacctaccaccttcatggtgtgcctggttagagataggatgataacatggaaagaaattgtactgaaccagaaggtgagtcatggctctgtctctgggcctccatttgtttctcttcaaaatgggataatatataccctcaatgcattgttatggaaaccaaaaataagtaatagatcaaaatatgtaaaagtattttgtagattgtggagtactttagagacagagggtattaagcctactaatactactcttgtgctgcattttgggtttttttggaagttttatcaagttttataaaaaaagaatgtgaattttaacccatattaatacctcatattaaattagatttttgctgtataacaattaataaatgttgggaattggaattgcagttttacaattgcgttaatgtccaaattaaaatcagcagcctgactgattgaatgttttgttttttaaatcacacatttgcctgaattgttcatgttagtagatagccatgataatcttttaatctacgacttaaaagtttctgagaaaatatgatatttgatgttgagaagggaaaaaaacgtgtgttattcatagagagtatggtatgcagtctggtgaatttgtcctagtaaacctgatttttagcattacttaagacataaattctcaatctccaaggaattatttttaaacatattattttcacaagtacccgtgaatggatgtggtctatgggaaacaccaaaatagatataaaattgatggtcttaaaatttgtgatttaccatgcatgttacattagttatttgtataaacatgatgttgttcctctttgacagaatttagaggttggatacttgatgcatctgaagaaaccatagaagtttgcgattatattacagaattcctctcatgtctgtgcaaaaaccctgcactctgtgttacagctcttcagtctatttcctattctgtaaataaatgtctaggtattgtaattatacatgtggcatcctttttactttagtattgaaataacaattctttatatcgtcactgtcatgaattcttacctttgaatagcactttatagctttcgggatgttttctcttattatcttattaaatatttacaattaccaagaggtaaacatggtaggcatgtttatcctctctatgtaagaagtaacagatgtagagaaattcttatttacaaagttcaggtgggaagtagtagagctgagatttaaacacttgcattttaacttgtttttttttttttttgctgttatttccaccataccatactgttttccacaagaaccatcatttctagaactttatatttaagtttacattagcataaaggaatgcatttgaatatctaaagattctcctattaagaattggcgtgaaactctgtatacatatattatttctgaaagatttactggaagactgcaattacacaaaataaactataagcataaagacatcattatcccagggaattgtttatctgcaaatgtgaatactagaaaagtgtttataaatgttagaagaatgggtgcaaataaattcttatgggacaataatatggggtctattttacctctttccgtttaacgcttaagaggaacctcgtcatcgtgactactccagagcatggattatgggtgctgtgcgggcttgcagtccttgcatctgtgcttcttggtatggatagaaagcaactctgaagatgttcgtgatatgacagtagagtgtgcctagatctagcttttctgttttgctcccctctcccaatcttgatctctctctcttttttttttttttttggtgggcgggggtcagagtttccactctgtcacccaggctggagtgcagtggcgcgatcttggctcactgcaacctctgcctcccaggttcaagcgattctcctgcctcagcctcctgagtagctgggactacaggtgtgtgccaccatgcccggctaattttttcttgtatttttagtagagacagggtttcaccgtgttagccaggatggtctggatctcctgacctcgtgatccacccgcctcggcctcccaaagtgctgggattacaggcgtgagccaccgcgcctggctcttgttctcttttgaaagaagttgagaaaagttccaagaggtggaaggggcacgaggaatgactgctgcgagctgacagtggctgtgcagccgacagcagcctcacaccagtggactcatcctgaggctggagattggctttctccagctcagttgttgagcggggagctgcgatggaagcaacaccacacatgaaagttacatttctttattcatgtctaaattggtctgtttaacaatagtagggagaaaatcaacaactgcattttctctgggcctctattctgtgataaaatggtaactccaagctgtatttattctgcctggaaaagaggaagaaagcgttcttttcctccaattatggtggaacgcggcccttgagaaaataccgtggagccttttgagcaggcttcactggtgtgagaacacattccaagttaaatcagcagagctactggaaggaatgcaaggtgggagagggggaagtttatatgtttctctcttcagtggtgactttagcttcatgtgacatgtcctcaaaccttctgggccagtgactttcaaccctggtggctgtggcggtgctgcagtcacactaggttggagactggatgcgccatgagtcctgtacttacgtatgaggcacagctgctttccagtgtaggaatttactgtaatggtcagtacattaggatttcatttaaaaccttcatattaactagttatccttgggatatgctggttaacagcatgtaatcagtcagataaagcccaactgtgcatacaagttatgtgacattggaaaggattcttgatttctgtgaattataatttcctcatgtataaaacgaaggtcacaatccctctgtaacaatggctcttcaaaaggttagaggagccagggtatgaccctggcacttaaaggcccaataaagcagtcactattattgttgcagtcagcaaatacaaaacaagagctgctgtcacatgggggttcaagacattgtcactctcttttccattgttgccattggtttcccacactgatgctagtgatgaagagccttaagaaacacaggcagcagggtggtctgttaggaagcgtgtgtgtttgtgttgtctgggtacgtgagcatgcaggtgctgctgagccccgtcagcagctcaccttttcaacagatatttaggacctgcctgcctctcagtgccagcacactttgaggcactaggaacacagcaatggaaaaacaattccactgttcggcttcccaaagttctgggattacaggcgtgagccaccatgcccggcctaaacacccatttctaataaagcatgcccaggttagaaatcacagttgctgctctcagggagcttgtgttctagaagagaaagacaaccaataagttaaaaagataatgtcagaaagacatgcttgctgtgcatagagtgaaatatggtgacatggagtgagtgagtgagtgggaggctgatttcttttgggcagtcagagaagacaacctggtggaggacataaatctgcaactaaaatctgaaggagaaggagccacctaggcaagggtttgacaagagagcattctgggtagaaggatggctgaggagaaggccctgctacaggaacaggtgggacgaaactggagatgcgtcctgggaggctggagagggagggaaccagggccagagtctccctccttgaatgaattctaaagctgactggagtctgcaggcttctttgccatgtttctgaatagcactccagaaaaatcactgtgaaccagagggaagtaggctgctttgcctctggaaacttatcttagttatcaaatggagatctattttatatctatttctttgtgatggggatgtgagaacagtaaagtaaatgtaaaaacatcctgtgtactatgaaccaaaaacaaattgaaaagaaatattgtaaaatactgtgtcatattttgtagtctgaaaacaattataggactaatcctaaaatcctaatttcacatgtaattatttacttggtatttagcatgctatatggatgtggaacaatgttcttacattttcccaccagcattttgggggtagagtgagtgattcctccaataattatgatggatttacaccctttctaaacacccatttctaattattcttttttttttttttttttttgagacagagtcttactttgttgcccaggctgcaggggtgcgttctcggctcagtacaacctctgtctcccaggttcaaacgattctcgtgcctcagcctcctaagtagctgggattacaggtgtgcgccaccacggccagctacaattttatattttcagtggagatggggtttcactacgttggccaggctggtctcaaactcctgacctcaagtgatccatctgcctcggcctccaaaagggctggtattacagccatgagccactgtgcccggcctaaacactcatttctaataaagcatgcccaggttagaaatgactgttgtggcaacatttcatggcatcttaaatgctctagaatacattttatagctatcaattccttcagaatttgaaacacatttaatctctaaagctgttctcttaaggcatgcagcaaggaaacggggtaggtgaagatgcctggctgagcacatgctgtattctaggttcattttcgaagatatctttgccacagcacccagattgaaatggtctcattttgaaggtgaaggaactgttgctccgagagggatcgctcacgagtagtggagccgagatcgaatctgtgttaattcggagctcagtctctgtcacgtccccctcagtctacctggataaatatgagaagtgcaggctttcatctgaaccgtcctctgaccagctgcagatgacgtgaggttctggttcactttacacatttcgtccgacgtctcctttctaggggagaggagcctgagaccgaccatcgaagcagctacttcatggtctccctgttttaagttattgaaggtcccaaaagaatgcagcagacatttgttattgagcatttaaaatgccaggggaccttgtttgatatattacgcagtactacatctgagctatatgtgggtttttatttatattgacaaaaacagaaaacaaaatgagaaagtggaagtttttgtattcctgggcttataagcatttaagatgcagttgtccccctccttgcccttggccgattgactcattacttcagcttttagattctgagaaggtggagcctatggcaggtggcaaaggggagatggtggtctcctggaatcccccaggaattcggccggaggagagatggactgagttttggcgataggtcgcacaccttaccaacagcaggcggcgagggctccccacgctgctcgtttccagaggtgcctcgtattattgagaaggcgtgcagtgaatgaaaatgtgtccacacagctcctgctctgcctgtgacattgggttgctgtatattagctgggatagtatatttcaaattgctttctcaattgcaaagtatggtagaaataaatattcgctttaatttagtaactagaacttagaaaagttcctcctgtttcctgattgccaagtcgggatgagaaatagatttcataattatgatacaacttgatatcttgagataaatgtttaactttgaaagttaaacatggtattttttaaactttatcattttgtgttcattttgcacatctctatacctccaattttgaaaagaatttctcccaaagttatctttatgttatctttactctctgcttactgttttagtttggaggcttctcctttaacctgtggattctaaaagccttctaaatctgtgagaggactaaaaatttccatatgttaaatttattcttatacaaagttgacacttgtaatacacaaacctgctttgcatttatacaaaggaaacaaacttaactgtgtagccactgcattgcattttccaagttcctgaggcctcctcattctattttatgatctattttatggttgtgatacatttgtccttgggaaatgccttaaaaacattaaaataatttcttagaattgctaaatagttgctggagtattttaatttagtctgcctgaaactgttaatttgatctttcattcagcccatttttgttgagcatctgctgtgttataagtgaagctgcagtaatgaacaggaaacagacctgccctcatgttactttataatttagtgggagagaacatcttgcaggtaaaatgcaaattgatagacaggattatgtagaaaacagtgttaatcttttcttaagtaagaagacatctcagtgacatcttagacttgaaggacagtagccaggcatgagaatgagaagaggactgtaggcagaggagacagctgagaccagaaacatgccagagcatggtgtattccaggaattccaaggaaagcagcatccattagggaaagaagtgtaggaagtgggaggccgggaggatggtggggagtgtaaaggctggggccccatcacagaggggctttgaagctcctgtgaggaggttagccttgatcctaagagcaagaggaagccattggaaagagattttattttcgcctgggacatgatctgagtacacttgaatttcagaaagatcttcctgactgccatgtggagaatggattggaagggaccagactggagctaaggatgctcttggaggattttgtgtatggacaacacagccatggaggttgggtactgcagagggtgagggagcatcatgtgaatgcctggcccctacctcgtactgtacatcccggacagccttacatgggggctctgccagaggagaaattatagacatttgtgattgagattattgtggtctagatttaggcagtgacagtagaggtgaagaaaagcaagaagatccacaggccttgtaatgtatggctgtaaaggcaagggagtcagggagatacctggttttctgactgggcttatctgcctggagaagggtacatgggaaaaggagcaaggtcattttttgtttcatcctcaaaagggaatggactacttacagtgaagtgttaatggcagctaaattaagtaacatcgagtcttcttatttatttattttttaagagttagggtcttgctctgtcacccaggctggggtgcagtagcaccatcatagcttgctgtagcctcgacctccttggctgaaacagtcctcctgcctcagcctcccaagtagctatgactataggtgcgcatgactgttcctggataattaaaaaaaaatttttttttttcactttggccgagagttcaaggcgaggcaagaggatcgcttgagcccaggagttcaagaccagcctggacaacatggtgaaatcccatctctacaaaaaggacaaaaattagcccggtgtggtggtgcatgccagcagagtaaaaccctgtgtcaaaacaaacaaacacaaataaaaacaaaaaacaataccaccacaaattttttttgtagagatgaggtctggctatattgcccaggctggtctcgaactcctgacctcaagcaatcctctcgttctcccgaaaccctaggattacaggtgtgagccttttatctctgccttttatctgtttaaaatccaagagctactgattaacattagggcacatgctacgatgttttccatggaaatgtcttaaatttgggaaattaaatataggccaaaaaagaacttgaactctaatactgccttgtaaattatatgtttgctaagtgtttagcaagtgaaatcattttgcagccctgaaatgttaaatgaagccattttgttcttcctgtgaacacatgttagagatctaagtgataaaataccataattttgcttgattttccgaagtgtaatttcttgagaaaaaggctcgaagaacactggggccatggaaggagattaaatattaatttcatttcacagattttgaaattttaaaacatacattgtaattcagaaggtaaagttggtctcttttataagaactccccccaaaatgatagttaaccttaaatttagaaatgtgttcggaacagccgtgcacttggacttggctgtgttcaccacttgcgcttcccttgaggctggagtgattttattgccggtgttaggggagggtgttgggaaagtacacactttgtaccatattgcttataattatgtcacttttcagcagtgaatgttagaaagaatttaattggttctctagttcttgtgtgtgtacttttcacatgtagtggcatttcttttttctttttcttcttcttttttcttttttttttttttttttttttttttttttttttgagatgagccttgctctgttgtccaggctggagtacagtggcgtaatcccgactcactgcaacctccacctcccggattcaagagattctcctgtctcagactcctgagtagctaggactacaggtgtgcaccaccacgcctggctaattttttgtatttttagtagagacggggtttcaccatgttggccaggctgttttttgttgttgttgttgttgttgttgttgttgttgtttggagagatggagtctcgctctgtcgcccaggctggaattcagtggtgggatcttggctcattgctaccttcacctcctgggttcaagcagttgtcctgcctcagcctcctgagtagctgggattacaggcatgggccaccatgcctagctaatgtttttgtatttttagtagagatggggtttcaccatattggccgggctgttctcgaactcctgaccttgtgatctgcctgcctcagcctcccaaagtgctgggattacaggcgtgagtcaccgtgccaggcccttatgtagtggcatttctaacacaaaagatttatttttacctaaaatgacaatacttactgggttgccaaggagaatagttaagttgtagctaaagatgaaaagcccagagtaggcaagtaagaaaaccgaattggtaaaacttctttctccacaggacttctgttagtgatttgttcatgaactttgaaaggagcaatggcagttcctccccgatctccgttctactcaccacatcccaataccgtaaagtttatgagcagaggaatttaacataatgcattttaagttcataaactaacaaaataacttcagatcttttaaaaatgctttttagaagtttggcctgcatttctacctttttcaccatattctgtctcctcagctacctcctaactccctgaacttaaaactctctggggtcgctttccattaatagcttttgactttgtttcttatgctttggaaatgtatgccatagcgacattgctattttaagaggcttttatatattcacgttttctccctcttttctctctgtcttcccttgcccttccttctattccccttcttattcttgccaccccacaacaccccccattgagagatccaggcaagatagactcctttgcccttggtattccgtggaagttcagtgctatctgatctcactgttagggaaacagacagcacatattcttacctcagggaactaagatctagagaccatctggaaccatctctgagctctgtcattgatgggcagtttcacacaatctgttgattgataatgttatatcagagcttcagtgtattgcaagccattttatggaaatactggtgataagagtaacctgatgtgacatggtgcatgtggaatactgtgttaggtcctcccccacctccctcctggggcaacaaaatggccattctgaagagagaaattatattcaaagaattgtagcataaggttgaaattatattgttttataaaatatcactacagtatagagatgtcattagagagcagtaccagttaagcagccatcatttgcatatgcctaggagaacgtttttaataactaacctagttaccagtaaacacacagttttaatttatttcagttattaaccattaggaaacttctttaggttttttatcattggaatgatgtcaacaagaaatgtgtaatcagaaggaagagatactttactttgctgcagatactcagagcagtatgtagtgttttcatagaccagagaggagcctgcactgttatcattttttgtgaagaagctttcagcacacagctgcaatttctaaattgaatatttttatttcagaatggaaaaaggagactttattcacaagaaagtttacttaccagaaattttttgtcttttttcacgtggaagtaatcctaaattactcttccttaaatggaaatgttatcagtttgctaaagaaaaaatgctgtgtattctaggcacatgtgtgtacacacacacacacagacacgcaaagtttatcaggcaccatgatatggtcccatcctttaactttgtaattctgcttttgagaatctttcctaaggaaataatccaaaatgttggggacatgggagaactgtgtgtataaaggcattccttggtatcttatttaggcaactgaaaaattggaaacacccctgaaggactcatggaagggacgtaatttaatgaattcccgcacatgccttcaaatggaaattctttgagactaaagataattgttactaaaactttcaggaaggtagaaaaatgctttttaatgttaaatttaaattcaggaatttcccctagttttctaagttttctgtatttgtacttatattactttcataatgaagagaaagaatcccaaaatgttattcttttctgctctttaattgtttaataagtattgaaaattgctgccagactagggtcaacgattttaggcactctaaagctcttctttaaatacattaatgttttctacatattttggcaatgttttgttaatttaaagcgaaccatttagcttctgttacagatttgcacgtgcacacatagacacagcgggaaggatgagcactagaatttgaaatattaaaatagaaagtagagaattataagaaatgagtcagagagttgttgtaagaagataattgcaaagaaaaatttgtggaacatcagtgtttttgaagttccataggaatttttgcagcaatagttaaggaagccctaagttgtttttttttttttttttccccaagacagagtctcactctgtcacccaggctggggtctcctgcctcagcctcccaagtaactgggactacaggcatcctccaccatgcccggctaattttgtgtattttttagtagagacggggtttcaccgtgttagccaggatggtctcgatctcctgacctcgggatccgcccacctcggcctcccaaagtgctgggattgcaggcgtgagccactgcgcccagcctaggaagccctaagttttaaaaactttttaaagtttaaattaagcaaagagcttcatcaaaacatttaaattcggcaaataagtgctattacagagatgcatagatttgtttttccttttcttactttccctctcttcctccttccttccctttccttcccccttttttgttgtggtaaaatatacataacataaagtttaccatttcaacgatttttaagcacacatatttcagtggcattaagtacattcacattgctgtgtagccgtcaccaccatccatccatctccagaagtcttttcatcattccagactgaaattctgtactcagtaaacactaactcttcattccctcagccatggctaccccattttactttttgtctctctgaatttgactactctagggacctcctgtaatctttcccttttaacctccatgctgctaagtattattgaaagccattccctcattccaaagttactgttatcttctgtcttcaaaggctccggttcagagtccatttagggggttaaaaaacatggatttgcaccctgatctcttcagcttaactcagacatcattctctgacttggacacctaatcactgtgattgcgatttttcattactgcattccctattagttggaaggattttaggcaaatgtgactttgagttgggtgggaggtggtgggaggccttaccaagcatggctcacttagcagtattgatacccatctctctgtagaagagacctctgggtacgggatcggcgggggaggggggcggcgctcagatgacagcatgggtccttcactggtcatcctgacagtgacttgtctgagctctcacagtttgtaatgggtggtggtgctgggagctggcaggtttcagtttgacgctagcacacccaccttcccaactactgccaactgcctccagtgttaagatgtttgggcttcctttaagaatatagtttagttacagacaatctcgaagaaggtcaataattcactgggttagcttttaggccaacccttcatataataaaataatcggcttctttgtaaataccagtcattcctctgtgcttggcctttaagatattcttcatatagggtttaggagaaggaagcccactggttactgaactgaagcagccatcagctacagagacagtagtgctcacagtcatttgtaggaaactataagtgttgatgaaaaactgcaagatttcactggaaaacacagtagttctgtgttgagtaaaatggaggtgcagtaaggaaagtgaggcttcaaggtggtaatggcgtgcaagtcagtgtttttgagcagagaagtgatacgcacaaggctgttagtatgaggaactcttctctcaatgacctggaagagatgactagaggcagggaggccagttaggaaacagacagaatagcggaaaagttggccctaaactaggtgatagtactgaatatggaaagtacatttctcttagttgaaaggagttgattagagacaagtgtagtttctagactgggttctgcatatatagtttcattcaacaagtatttattgtatgttactatattagatataaaagctttatctgagcagcacatactcttgtgaatgtcatagctaatatgacgcaaaatgctcatcaattgagacatttcactaatgtttaattgatagtggtaatattcatatttgttaatatgcttttctaagtgttttatatgcatttatttgtcaagtcccttatgacatctctgtgctatatagttacttctatggcacctgtttgtagaggtggaacagcaaggcacagagaggttaagtaagtcttaagtagaatccctgtagggccaggatttgaacacaggttgtcacctacacagcccatggtttgacccaccccttgagtgaagaatgtgatgtaatatagccaacctgtgttccaggactctacaaaagattgtgaagttctgctctttatgaagcaattttttagtagctcttaccccttctcatatgaaagagtgttagggaaatctagaataagaagagaatttctaaaactaaatattgtgaactgtttggattttcttagcaatatgagggaacctaaagtgatcacacttataccactgattcactggtttcactcaggggttttgtttttgtttttctctatctttgggtaatcttgaatagggccgagctattatttactcctgatcagtaaaattctaggcttctgtctaattttgttaacatttatgcattgcctgttttttttttttttttttttttttgttgttgttgttgttttggtttgttttggtttggttttgagatggagactagctctgttgccaggctggagtgcagtggctgatcttggctcactgcaacctccacctcccaggttcaagcgattcttctgcctcagcctcccgagtagctgggattacaggcaagcactgccacacccagctaattgttacatttttagtagagacggagtttcaccatgttggccaggacggtctcatctcctgacctcatgatccgcccacttcagcctcccaaagtgctgggattacaggcgtgagccaccatgcccggcctgttttttttttttgctttgttttgttttgttttttgttgttgttgtttttaactgttctcatgtagcaagacttcttttcagtttaggcaaagcaacttgtgtcaatttatctaaattgaaattttgcatgtgtgaaactgaaaaatctttctctagtgcttaatccttcacgataagaaagtaggtgtgacctcttttgtttttagctatgaaattgctactttcctatttttccttctgtaggaaatctatagattgtgatcactaatagaactatcatagggaattattagtttaactttttaatgaaggaaaagagacatgagtcatgcagttaactgcaacagcctggtccgaaggccaggacacctctcatagtttttctttttttccttttccctatggtgtgtgttttttaagtttttttggttttgctttgagggggtgtagaatgggcaaattgaatggagaaagcattctgtacttcttttcatttgttctactttctcttttaccttttgtttttagtgcaggtatgataaactcttggtgactaatcatggtcaaggatttccatattgtcattaaagcatgtatatattatcgacatttaaagagttggaaaaatgaacacaagataattagattgctatttgaggattttgtagttccttcaagctctaattaattgtccaaaaagtattgtagttctatgataaattcccttgcatatgaattctacacctttagtcagtagttacagccaaaaacaaattatgtagcagttatgccttgattagttaaaatgaactaagtggaaaaattgaaaagaaagcttaattggtgtgaagtattgcattattttctgctatgggaatttttatggtgaagtataaaatgaaaatgtgatataaattcattttaaagtcttgaggaaagaattctttccttagaaagttatgtttttatgaaccacggtccatgaacaaccgtttcacaatagacataatggtccatagtttaattgtagttgcattttatttatttttgtatagtgttaatgtgaatattatcagaggatttgacttttattacaaatgaatctaaatgcataagcaccataagacttcctactgttgtctttctctactaccttattttggttgatacctgtgtagcatttttcaaaaggtacagttatttctcagaatttatgataataaggaaccgacagattcaggaagcatactgcattccaggtgtgaataagaaatctatgcctagaccgaagctatagaacatcaaagacaaagagaaagtctagaaagcagccagagaaaaagcgcagctcatctataaagaaatagactggcagtaacaccatggaactcagaagaaacacataaatgtctataaaatagcaatttagcaagactgtttcaagtactgttcaagaattatgataagatgaacacattttaaacaacagctgagggagttttaccaaagatctctaaaattcttctgaaagaactgcaggatgtaattaagacaaaggaaaattatcccagaaggaatacctgagatgtaggatggaatagtaaacagatagaatggcacagtaaagccaaacaaacatgatataacgtaataattgtgtttaatttgtggaattaaaggcaaaaaactgcaatgacatgagttagtccatgttgaagaagtccaccaggcagttgtgagaacatgggagtgggccgataaggcagttatgagggctccattgtcagcaaacaagtcaagtgtaaactaagaacaaagtcacttagattgagaatacatgatgaggattagggctacctttggtgaatatatggtatactggaggctaactggaggctgcctttatgcaactggccttggttgtcagtagttgactctagccaactgtaaatagaagacattattgggttggtatactgtagtacaaagagtaacacccagggggcaagagacctaggctttagtctaatttcctcaaataattgtacgtgaccttagacagtcatttatcctatttggcttccgttttcctcatctatgaaataagaagttatactctgttaatatccagtgttcgtttcagatctatgaataatactgcagattaacaatgaaagcaacaaatgtgcgcaaataataggaatggtatgggaccttacatggtgaggtttttaagtatggcatgaggttttgttttgttttgtttcgtttttttgaaatgaagtttcgctcttgttgcccaggctggagtgcaatggcatgatctcggctcaccgcaacctctgcctcctgggttgaagcaattctcctgcttcagcctctcgagtagctgggattacaggcatgtgccaccatgcctggctaattttgtatttttagtagggacggggtttctccatgttggtcaggctggtcccgaactcctgacctcaggtggtccgcccgcctcggcctcccaaagtgctgggattacaggcgtgagccacggcgccctgccggcatgaagttttgaacttgccattttgccgctctagtgctgcctaaggcactttgaaggcagtaattgcagaggcatttcgtgccttcaaagctcagtcccaacctaagttccttaccctctgagatgatcccaggagtggcctcctctgttgcatgacatttagatccagggctctctgaagcctatggacttagtaccattcatgtgagatggagtgatggcaggaaaagaattctgtgttgcaactgctgtgccctgaagttgagacctcagttgaaggtaatgataaaaaaagaaatgctaggtgcattattactgcttcatctctacttccttgggttagttaaaaggcatttaccagattagttaacactgaaaacaggatctgtcacgagccaagtatttcagtgtgtgttttgtgttttgctcaaaataaccctggtatccaacactcacattaaacaccacaggaagattttggttgaatgtgtactgaaggttgaggggtgcctgcaacgcaatctcatggacttacctttttttctgtactgactagaaactgattgcactatagccaaattacataccagcacaaagggaattcagcggcaggcctgaacagaatagaagtgacaagcaagaatcaattaaaggagtcagccccctgggtctgttcagtaacacaggctagcactgtgggaatcttatactcggtgctttgctcaagatcagtgccttgactttgtacattgctaatgcacacacaaaacctttgggtatcatgaaatttttgatgacattattgaatatttgaatattgctgggtgttttttgttttgtttttggtgactcagcgtataaacctgctttctttgggggacaaaagaaaggtatggaacttaaaacgcagcatgtattttctgctactgaatccaaagatcgtagatgctactgagggagcatgtgactaatgactaaggcttggccagccattagctcttgcctgattaaactccacagactttggaatctagcaatattgtcagcatcgtgtgtccattattagaattgttggtggtgactttctgggcaaattatttcttttgaccagtctcccttggttcttaccttttatgcaatcctggttctccactactgattctgtaaactaatccaatatttttaatgaaatccgcttccttagttagctaaattcagtttcgattctttctaagaatcctgattgctacagttaggaaatcagctatcatatgagttttaaaataaggggaggtatgctatgaattattggtaagtagggtcctgctatgaaagtgatgagagagactctgtactttaataggttaaaacttatttgtaattatgttgctgtggaatataagcagtttttttcatctcacccaatacagctactaggctttatagatgtatgacagagttaccatgtgcaatagagtttggggtgataccaacaccattgaattaatcagtgttttgatagaagggtgatcatctgaattccaaatttgaggaatacaatagttttcagttaaatatgaatctttagattggcatctagagccattaaatttcctttgtaaactaaagcatgatgagtaaaaaattaccaattaccttatgtatactaaatactgtactagtctctgtattatgccaggaataaaaaaaaaaaaaggatagcacaataatatgccactctccatcttatagaaacatgcaggctaaagtaaaaaacaaataatcagattattataactcagtattttgaagagcagctggctaatctgactcgagggcatcagactgggaaagacgagatgacatttgatgccacgtgtcttttaatccagcatttttcacacaatgccctgcacgtcgtagctactgagaaaatatttggggagtaagtttgaacggaactgtgacttgaagaataaagagttgatgagagcctgatggagatataaagaaacaccagggatatgatttctgattggagcaatacaaggagaaatggataagtcccggagttttgagcttgggcagattgggaaatagtttgtcaataactgacaatacagaagttagttagggatcagcagaatgatgagagaaaattaatttagtttttgacatgttaaattcaaggtttttgaaggacatcctcatgggactgtttagtgtgcagttggagaggtctggtcagtcctggagcttgggtggaggaaactaagacacagatttgggattcaccacaatatttgatatttgaagccatatctgatattctcctgggtgtgaatgagattgctcaagaaaagtgcgaagactgtctctgatagatccatgaggaagataatacttttaaatttgacacttctagagctgatcagagttattctaaaggggacccactgtagttagaacacttctgtagcctgtttctattgggagcagttggttctcctgacttcagagtttcccaggtgctgacttaccgtataaccctgcgtttgctgtcattctgtcttcacttcactgctttcattcctggcacgatagtaaaattgtagatgttctcctgtcctcattgtgccaatcacagcattactccgaccccactgctacatacatcccccaaccctcagaaagaaacacaaagctgtgatgtgaatcctgcatcttcattgccttcaagacagcaaaaattagaccggttcagagcctcttgatacatctgtaaggagatatcttctcacaaatggaaactcttttcagtttgctcaggagaagggttggtagaagtggttcttttatctcggaagacatttgcctagtttaagtacagtacttgagccagcctggcttgtagacagtgtctgtcaaattactattggctgctatttttgcattattagaaacatttcagtattaatcgttatttccccttttaatgctttgtgctgtattttcacgtcaataatcactgatacatttatatgcaattatgtcttcagtttttaaaaaaagagccccctcaatgtaattttaaacttcaatactcaattgcaaataggtgccaccatcgccaccccccaccccaaatatctagatttgtccagtgtggctgttgagcacttgaattgtggctactttacaaagtgagatctgcttcaagtaaaagatacacatcagattttgaagacatggcattaaaaacaaagtaaaatacagcaagtccttgaataatattgttttgttcaatgttgtttccttataacttggaggagaaaaaaaaatatcgattcccagctgggaccactgtctgtgtggagcttcctcctacatcccgaagatgtgccagttatgggacctggcatgtcggcatggtctcattgtgagtgattgtgggtgtgtgagtggccctgcaatggagtggcattctggccagagtgggtcccgcctgtgctctgcagggatgggctctgcccatgtgcgacccaaactggaatacttgggtaaataatgatattacttatttttactaatctttcttaaatgtatgtatagctcacgtttgtttcgatgtttaatattgtaagtattttgagtcttatttcttatttatatcaattggcccatggaaaacttggtttcctggtagggcattttacttgaagtcatgccttccaaggaacctatcaatgttgttaagtgaagacttactgtatctcattaattttgtattgcttaaaggttgaaatgataaaatttggggtatgttgggtcaaataaaacatgttatcaaaataattccacctgtttccctttgcttagtgtggctgctaggaaatggtaaattacaaatgtagttggattgtatttctgttggacagggttgctctagacaaacctacaccaaacacaacttctgcgccccagggaatggaccttccctgtggacttgttatagtggtggattgcccttgtttcaaatgtcattgcccagtgtagaaacctctggtaatccatcaacaattctggtaaattttaaagccacattattgattagggagagttttgggaaggcagattgggaaataattcatactcactgagctactcaagagtaatacttccaatcagtaaaacatctattggggaccacaggaagatgttctttttgtttgtttgttgtggctaatagatgactattagattttataaaatatgtttgttttggctattaaatgactattagattttataaaatatatgtttacttactaccttgttcccaaagggatttaaggcatttagttagcatctttctttaggaattcatcagtagtaacaaatgagcagtgctagttgaaattctaaaataaaaactcatattcctctaggtaattgctttttaacctttttaggggtctttcctgagaccagactgcattcatctgaaaacaaacctgtagttaggacaatccatgagtaaagaaggcctcatatttagaatgtcatagcttctcagaatctgctttgaaattgaaagtcaacatagctccttctgctgtggtgcaaatgtctagagcctaaacatctctaaaatggaaactgggctgggtgtggtggctcatgcctgaaatcccagcactttgggaagctgaggcagacagaaggattgcttgagcccaggagttggagaccagcctgggcaacatgagacaccatctctacaaaaaaaaaaaaaaaaaaattagctgggcatggtgtcatgtgcttgtagtcccagttactcaaggggctaaggtgggaggataggttgagcccaggaggttgaggctgcagtgagtcatgatagtgccatggcattccagcctgggcaacagagcaagaccatgtctctaaataaaagtaaagtaataagtaaaatggaaactgacttgtttttagtaggaaagaatgtctaaacaaaaagtagtatgcttttttttttttttttttttttgagatacagtcttgctctgttgcccaggctggagtgcagtggtacaacctcggctcactgcaacctctgcttcccaggttcaagtgattgttctgcctcagcctcccaacagctgggactacaggcatgtgccactacacccagctaatttttgtatttttagtagagacagagtttcaccatattggccaggcaggtctcgaactcctgacctcatgatccttccgccttgccctccaaaagtgctgggattacaggcgtgagccaccgtgcccggcataactatttcctttttatgataaaactctgcttcctggagatacttgtcaaaaattattacccatctacatgtgagaccttcaggtctcagccttactcttcgtttactaatctgaagttttggatttctggcgtatgagaatttctggtttccagcacatctctttcatttctgcttaaatttagtagctaaattaatctgtagcaaacttttctatggatttttgcaggtgggaaaatatacataaattcacaatggatggaccttgccttcatagaggttaaaaggaaaatagacatatatgtgattatatatacaacagtaaaattctatcagtccagtgcagtagtacataaagtgcagtacattccaaccatggggggtcagggaagacttggaagcatgacctcaaagggcaaatgtacagggaaagtgaagggatctgtatgaataaagggctgaaaaaaaatacggtaggctcagcacagaaatcatgacagggtgcttcatattccaataatgagttgaggtaaggggtgatatcatatggcagattaggaacagattctccaaagccctttatcccgaggtaagaagtctagacccagttctgttggtctgagggatattaagcagaatgacatgttcaaatctgttatctgaagaggacactgggggcactgtgagggagaatgggttggaaagagcctggtgtcaaggaaaccagtttcacagtattctaggcttaggaggagagatgcgagtctcagttaaggcattggtaatgggaatggaggctagtctgtatttcaggaatggtcagatgatgtttatagccagcatctggtaagtgctgatttcattctcataacaaccatcagagcagactgtcgtcatatacatgaagaagctgaggcccagagatgctaagaaacttgtctaacttctccaaagccactgcttggaggagttaaatttagttctgtttagtgttacctgagtccatgtttcacttcctatttctctctagatttggaggaaaaagcagttctgaaattgtaaaatttctagcctggtggcttttgctttcattaaggaaggagggaagaacttgtccattaaatgttggtactcctgaaggttctgttttaggctctatcgtcctttgtgatgcctttttatgataaaactcagtcatccacgctcactcaactgtcatctaattgcctgcgaatccatgttctttagtctcctgcaacttgtgccatgacctgtatttcctgctgccagcgggtcacctccgcggatataccacaagcatgtcaaattgccgaggacacaaccatgccattcattcttcccaccaagccaaaagaaaatctgggtgtatctggacgactcctgtcttccccttcatatgcagccattatgtttctagagctagaaccatctgaaaatcttaagtcctttagggttttttcgccccctgcctttctcttttagcaaagataaataaaaagtgaaacaaattggcacaacttggaggatgaagaagtagcaaaagacaaagctgttagagggataggagaaagtcatttcaggaaggagggaatagacataacaagcaaatttgccgttcaggaaatgttttatttaagaaaattaataatatttagaaaataaattggatggaaataaatttttaacattccttctctgatgaagaactgacctaaaatgtagttagttctttattcttgctttttaaccttgtagataacatcatgttagtcatttacccccatacaagttgagcactctgtaagggatgtaatttaaacatgtctcaaaaccaaaaaccagtccatgggcagatctttttattgcgataatatataactacataactgtaaattggaacctaaaaatatatatttaatatgaaattaattttttttaattaacccaaactttaacttttttataaggggttgtgtttgaatgctttagccactaggcatgtgtttttctttctgatgctgttggagctataaatagtaggtagaactgaatgagatggcatcacataaacaacagcctagcttggtcatttctcctactcagatcgcgagtcaaaatattaaacagtggtggtttcaaactatatgtaatttcctcaaaattatgcttctctaatattttttccatcgctttttcctcaccaaagatttgttacctctccccttatataactcttggtcataactcaataaattatttttttaaggagtggtacgtgagtttatgctgtacgtggtttctttggctgatctacttgagtccttaattttcttacaaaaagtaacctggaacttatggctagaaacgatacattcttacaatattaatggccgaaggaacgttacttctttgcagaattcgataaagaaatgagaaattcggggacccggaaacttttagcgcttgccctgaacagcggcccggaatctcccgcccacccgtccctgcccggatgcctgcgcggcggcggcgtccttccctcctcggctgcgcttttactcttggtcagggcccgcttgagagagggggattttagagagagggtgtgaaggacgcaggaccgctttcaggccgccagctctcaggcctcgctttccggtcctcactgcgcgtccacacctcgccttggtttcttttgttttattcaagccccggccccgcggtacagcggggagactcgcccgcgcccacggaagaagccgagctcctccgaagggagaaccagtgattccacggaccccggaatcccccgggagtgggaccaccaggcagcgggcggaattaaccctgccgcggaggcgctgggcgaggatgagggcggcgagcgcggaggggaccgagtcacacagcagcccggcggcctctgccggcaggccccgctcgctcctttcggcccgacccgggcgggggttccggtgccgccctccctaccccgcacgtaggctcgtgggggcggggacagggggacgaaaacaaccgcgtcctcagcctgactgaacaggctcggactcctccgacggcgccgcgccgcgcacagatgagcctttgtgggaccccgcggaaggaggcgccggccgcagccacattcctttccgggcaagcgcggccgccgcctgcaggcaccgtccgccccgcgcgcccgcaggctcctcctggaggcgggaggcggcggccgctcgcacagcgtgttttctaaagtttctgctgacacagcttcgcgtacacatgagccggcgcggccagactcacgcaggcaccgagtgtttcccctgcgccgtctcgcgccgccgccccgctacctcgccgcgcgcccctaacctctgcgtcccgcgtggcgcgcccagcgcttaaggttttatttttcccctacttcctttggtgcatctctttccccctctcaaaaccaccacccaaacttaaaggctggatgagttggaacccgttcgcgtaattaaaacgagtggctgacggtggaaaagccaggaactacagacgaaggacgccagcagggccgcggagcccaggccgccaagaacagggcggggaggcggggcggggccgcggaagggggcgaggtggaggggcggggccggcgggaggtgggcggggcgaggctggcaggccgccgccattggctgttacccgacgcaccgaggctgggcggcttagccaggcacttggattctatttgtgtaatagctgcttcttggagccaagtgcatgctcatcaaccttccttgctgggaaaaccaactcacagcattttttaaaagccgagaaacgcctaggcttgtaaagtttcatctcctgcctgtgctttcctgttcttaattaaatgctgaagagtcttgtcgggatattacttttcatcctgtctctgccatggagactttgggatcactgggtggtctcttggtcacttgcaggtgttttaggtaggatgttgcaatctgcaatctaggaacatttgacgactttttcaagtaagctaaacaacacatgaaactatagtagattaaccaagacatgcatttaatccaactagtagcaatcagcgacggccactttggttttacactttttgttcactctgtgaactatataatttgaccataaattctaatttgttctcttgttgataattcttatgcagataacttataacttatgtgtgtatttttatcagactcaaagcaacttaattttggaattctgcaaatttaattgatgatccattataacaacgtagggttagggttagggtcagttttcggtgttgatgtagagacagaatccaaaagtattttgaaatgtttaagagaaatggccttgaagagttctgaatattaacattcttctgtttttatgccttgtagtgtttaccgcacgtgtgaatatgcatagaaattttcatgtagcaatttctgtgtttgtgatctgtatacagattttataaaaataatagcagggacatttctgaccttgatcattgttgttaactgatgacatttgccagttacagtttaaattaagttgaatttattatttaggtgtttcataagaaggagtgagttgcatactaggatatactcttgtattccatatcctctcctcactccggcgcttcctaacaggaagagcaaatgcattgtgaggataaacactgattggttactatctgtagagcaggattagcagctctttttagattttgagctgcaatctcttttaatagtgcttaaattgatgcaggtcagtgaattttgtgtttacaggcttttaactccctagctttgtgaatactgaatttatggaaaagcttaattttctctgtatctcagaagggatatgtacaattaaaaaagaaaacaatacaaattattttacataaactggagcaatttggaaacagtgtaataagggttgagtaaaagatttctccccatcgtcgtggcatattctactgttacacttacctgccattgctcataatgggtctgacgttgtaggtacatctaagtgtggtttgcagtcactattttatgttatttggaaagtcttggattttaaaatgttaacccaaataaatatcaacaaggcatatctatttgggagtcacttatgacttctgcccctccaacagtaatttctatttgctgcaaacatttgccaagtttacggcaaattttgaagttaaactttgcctacctaatataatgagtgtgtggttcctatgctcccctaggtttgccaaaggtagtcttgatgtaaataatacattcaagtgagatgtcaagcaagtgtatggcttgacagattttgcatgtagattgtagctagttatctcaggttatttattctttaaactttcaccaatttacccattttaaaaatagtgaatttgtattaaaaatagttggtaacataaaccatggcattcagcctacatttcatatgagatttatctgcctgtgcagagatgttacttaacttgaaggcctctttgtggaagaaagatttgtcttccaacattttgcgtcagcagtgctgaagtgccactctgtggaagttgcttcttatggccttcctgccacaaaaatgatatgtggtttaactctttcaggaactggggtcatttcatcccaaacgctgaccaaggttgtttataaactcttagaaaaacataacataaatgaatcttactgccaagtgacaagtttctttttatgtttggttgtaaattatttcagaaacctcatttttgtttaaaaagcagatttgtatgaacaaaattgagtgaacaaattgagtccatttaatattaaaatgttgaaagggcttacttggtgtagatgtttcaaacatcaaaaatctagcttttcggggctggatgcagtggctcatgcctttaatcccaaaacttcaggagactgaggcgggcagatcacttgaggtcaggagttcaagaccagcctggccaacatggcaaaaccccatctctacttaaaaaacaaaacaaaacaaaaaacagccagatctggtggcacacacctgtaatcccagctactcaggtggctgaggcagggaaatcacttgaacctggaggcagaggttacagtgaaccttgactgcaccagtggactccagtgttggcaacagagtgagattctgtaaaacaaaacaaaaaagaaaaaaaaacccaaaatctggcttttcatccttgagactacatttcaagctttttgctattgagtagaaaggaacttcatggtgtagttccatacatttctgagctataagaaaaaggtatagtgatgatgtgttaagtgccatgcttcagatctgaaggttgtgtaataattttcatgactgcgcttgtacagacgatttcaccattggctgcagttctgattttaagttcatttgctcgttttcatgttgaagttgacatttatatgtagttgtattaaataacaaagaattttagtaaatgattcctttcttactccaaagcaaaaaactcaaaaactttgacctcctccataagaaaaatgtagcaattcccaaattatgcagaaatgtctagaaattatcaaatgtaaaatttaactctatattctagaacactttctcagaacaaaaagatgtgttacacggtggaaactaaaggaattttaagatgagaaactataggatattgtttgaattcatgtctgaatatttggacaagatgaaagttttctgagcattgtggatggattactatgttgagaaatgcataacaatgatgtgtaaggcagaacagtattctagtaggacggtagaacattcttgttaccttaacaagttcccctctatctttatagttagtccctctctgttaacacccaagtcctggctgccacagatctgttttctttctctgtagattggccttttccagaatgtcatatgaatggaatcatacagtgggtggcctcttgagtcaggcttcttagcacagtgcatttgagagtcatccatttccttgtttgtatcagtagttaattccttttcattggtgagtcgttttccattgtttggctatgatcatagttttgtttatccactcatcagttgaagggtatttggattgttttcagtttttgtcaactatgatgaaagcctccctaaacactctcatataggttttcatgttaatatattttcattgctcttgggtgaatacctagaagtagaggattgctggatcatatagcagactgcatttacctttgtaagaaactaccaggcttcttctccaaagtggctgtaacattgtgctggaatagatttttttttttttttgaggtggagtctcgccctgttgcccaggttggcgtgcagtggcacaatttcggctcactgcagcctccgcctggtgagttcaagagattgtcctgcctcagcctcctgagtagctgggattacaggcacccgccaccatgcctggctaatttttgtatttgtagtagagacagagtttcaccatgttggccaggctggtctcaaactcccgacctcaggcgatccacctcaaagtgctgggattacaggcatgagccactgcgccaggcctatttttaaaaatcagatctctcctttgactccaatgtttttatcatggaaagagacaaatcactcatattttctttttccagacaatactgctttctgtggtgtagccaaaagactcgtcttttccatgttcaggtaatttattctttgggagagcactgtaatcatatatcaatcgtattttaaagtgactttattatttaatgtcaagatgtacccttgatatgaagtagttttatttaataaagcagcaacagatcaagagcacttggtctagaggagtatgctgacaagtggcggcgcctgccttcttctcggggccagtcttcatctcagagctgtctagctttcaggtttgtcttcattgcttccagtctcacctaagcctcatgaatcctcagagacctatttcttaggtgagtagaggagtgtttgtaatcatcactgtgacttgtttttgtgctaaaataccctttttatttttgagatgggggggtctcactattttgccccagttggtctcgaaatcctgagctcgagcaattgtcctacctcggtctctttattagccaggattacagatgcgtgccactgcgcctggctattagaagatgcactttttaaagaggtgaaggggagcagagtggaatagtggtattgtgacagttacctggaaaacttctaactcctcttcctaaatttacctcttacagagtgtcctgtattaggtagcctcagtttccttcccatgtaatgcatacatagttatttgttattattgcccttagcaggtaaggctgtattaagcaatttatgtgagagaagaaagggagatgacatgattggtggggagccagtttagttaagtttctttggacaaataggacttttgagaaatctgaaaagaataaaaaaaaatagttgtctgtcttccctagagtcattttttcttagcttcaaacttattagtttacctaattaaatagattcttcaaaataagtttcctctaacacaataattcatcttaaggtaaaagataaaactctgtggttaaatttcagtatacctaatcttacattctttcttttattgaattgtctttccattccaatttgataatcaaaataatactatactatttaatttgaactttgaaaggttttaaatatgcactgtgataaatgtctttggtcgtaaccactatttcagtgttttgaaacccccatctgttttggtagaagtattttaggataagaaagaagttttgtcatctgttagttttttgacatttggacccaagtgacagagttgggggcaggaacgtttggacagggaacagggcagcagaaagaaaaccagtgacacacaatcgagatgtatgaacagccatttgctggctgtaatagaagtttcatttgctgatctaaaaatgtatttgtttttaaaacaccttttcattctcacctaatcaataaagtcatctttattgcacctcattttctttgataccataattaagttttacatgcctctatcttggggatggccatagcctgtgtgtccacaatatgtcttctacatagtgactttgtaacaactttcagcttccttttctaacttcaatggcagggtgggactgggagagggatttaagtatgatcaaatagtaccttagccacaatttttatcttttagtacttccgttgatttatccaggtattttttaaatgtaagattttcctttttatgaaatgtcaaaattaggaaaagagtttatttattacatttttggagaatctaaacttaccaagctgtagcataagacattggcttcataaactgtgtgtgtatgtgtgtgtgtgtgtaaatggttgggtaaattgggaagtattgcttaaataaaatggcattgaattatgaccaaattatatcacataatgcaagataaatatttagaatatgactaaacattatctcactttttgtaaagtttattaactaccacttacttagtgctcatatgttttttaacagtccctcactgcctggacacccatcatttttattttccttcatcaaactttctagaatttaggaataagtatagaaagtgttaagaagaaatagttattaatttgaattatacagaaaaatcaatcatgtagaaataataatgtaatgaataagtattagtgttttctaatttaataagatacagtttacataaagatctaaagggaaagcattgcttttattgaaagtactacctgttttcaaaatgtttgatacatacacatgtgttgcattggaaaggccaaatgaaataatgaatagataactatattttggtctatattgttcatgatctcatagccatgttttttgataaacgctggaagtatggaaatgatgaactttgatacatgtgatttccttaggtatagtgttcttaatgcccccaaatctacaaataatgtcatcatgtaactgacagggttacactattccactgtctcaagaaaattatttatggaaaaggtatggtactgtgaccacataagccttctgagtgccgctattcttctgtagaatttgggcctgtcagtctcctttacaatcatgccctgtagcataggcagatattcttaccatccactgtgttgtggtcagccaacctaaattggaaagctcaaaattactttttaaaattgtttggaaggattgcgaactgtatgtatttttataaaatatttactgtagtctaactggagttatttattggtatgattcaagtctagaagtcattacctcttaactcaggatggatagaaaagatctatctttgagcaacatacatactcattttattgccatcagtttataagaactaatcctttttaaggaatttaaggtctactcttggctagagagacaaatgcatcaaatgcatatatatgtattcaatatagcaaaattggtttttggtttgatttttagtaacagtcatgtgtaatgcatgcaagcatgtatcaccaaccacacatatgacttctacttatatagttatattaggtagagcatattttaaaccttgttatatccccacctgtgtcataatgagctgtgtcaaatttgggttcatacacatgtatttatatttttattgttttgttatagtctttagcgcattcattcatatacatttattcaacaaatatttagtgagctcctactctgtgtctggcactcttccaggtaagagacatgcaacagtgaatgagctagcctgctcttgtgaagttgacatttcagtaaagggagaaaggtgatacacaaatgaataaacaagaaaatctcaggtgattatacaaaagaaggagagggattctcttgaggagtgattggtacgacaggactggccatgggatgatctggtagcacagtaattcaggaggagggagcagccagtgcaaaggccctcaggtgaacagtggccatttggaggaacagaaggcaagccagtgcagcgggaacattgtgaagagcagcgggtggcaggaccgaggacctgcaaggcaggcgggagccacgtggtttagcttcttgtggaccatggtaagcagctcggcttaattttacggtcttggaagacttcgaaggttttaaggagggagtggagatgaaagaagcaattggctgcgtggatgctttcagaacttcctttagtgtcatggtgttcttgcctggaactctgcctgtaaatccatggcacctagagttcctttatttaaagttgtacagtgcatcagttagtttttgcagtagtgctcagaacagccaccatttatgtagctcatgattctacagtttgacgatttgggctgggctcagctgggtggttctggtttgtactgggcttgttccttctacttcagtcagctactgacctgctaagtggctctgcttctcgggctcttggcttgactggctcttggctaaggcgatgtggtaacaggaccatgtgttatcatcaagctagtctgggcttgttcatgtggtggttggttgtgtttcaagagaatgattagaagaattgcctcttgagtcctagacttggaagtggcacagcatgattgctgctgcagcagtctcttgacccaggtaaatcataaatccagtccagattgaggggtagagaattagactccaccttgggtggaagaggctataacaccacattgcatagtagtggctggtttcgcacacttcaaggtctctctgtctctgagtgataccaagagttcaagattggttcataccaggtgtcctcattgctttgtaaatcctctgtggaggtatcctcactgagttagagaacataattggaaataagggtgtgaccacagtgctgactgactttgttttaaatttaacagccttgaatagaaagacacaccagcatcctagtggaggagatcatgtgagcatatcacttgcggtgaaaagtgtaattatgttaacatcacaccgccttgaaattgtgtcttagagtactaagtttatcaaatgctttttgattgcatagatgtatttttcattgttaccaatatttattgggtccctgtatagagacaaggttttagttcatttccaatacattcagaggacggccgctgtactcagcagcacgaggctaccgtgcgtgttctttccactgctggctaacggtgcactgagcgatttcagcaagccatgtccttcagccgtcatgtggtctgtcatgctaatgaggagaacgaggagaattaataagtaaaagaggaatgctggcagtggcttatggttggtttttttttttcttaagagttctatgtttttaatggattaaaatcccaaaaagttaataaaataataataaagaaaaacacggaacaacttctttgtttgataaaattaaaactttgcaacccatatgcttctcctgcagtttaaattgtcataaatcctggaacatggttttggagagcagtttatttattagtgtctacttttccttaatgtaggtaaaagtatgattaatggaataggttgtagttggtgtattggacttgttggcccaatcaagggagatacagcaaacattgtaaggagagtatttttatcccctggacaccaatgtaggcaaaaattattctttccaagagcatctaaattcttggtaatacccttgcagataaatattattgtgactggaaatttaatcaatttcttgttgattgttactagcctcctctcctcacctttattcccctttgggcagaacagctcacttgtgtaattttgcctttcccatccttgcctggaattggaggcaaaatctatatcattttaatgtttaattatggtaaaggtatgatatctataatcactggaaaaaataaaggaatattcttcatcacagttattcaaatggaaaattaaaatggagtcaccccctcctcttgttatttcacaataaattacagtttgatcaaatatttaaatgtaaaaaagtcaaatatattaaaagaaaacaaatgaaattttttttttttttgagatggtgcctcactctgttgcccaggctggatggagtgcaatggtgcgatctcacggcaacctccgcctccctggttctagctgttctcctgcctcagcctcagcctcccaagtagctgggactaccggcatgcgccaccacgctcagctaatttttgtgtctttagtagagacagggtttcaccatgttggccaggctggtctcgaactcctgacctcaggtgatcctcctgcctcggcctgccaaagtgccgggattacaggtgtgagccaccacgcccggcccaaaatgaatattttttaaaatgctgcagtgaggaagacattttccagcatggcacaaactctagaagcttggggaaaacaaatggatacattcaaatatttaaaatgtcaaattttttgtttttaatttctttacattaacacagttatgagcattttcccgtgttacaaactatctcttaaaacctgaatttttcatgattattaatgctctatcatgtgaatataccatactttaaccatctcccatatttgtacgtttttttctaatatgttattttaaataatgtggtacacatgcttaatatataaatggtagatcacaaattataacttgaagatagctctttctagcggcttgattgctggataaatgggcatgagtatgtttgaggatattgatatgtaatggaagattgttttctgggcgggtcattcttagctacaggcccaccatagatgttgagaaacctaggtgtacacataaacctggaccactatatttttaatttttgctaccttgaaagataagatgtttattcacatttccatgattattaattgacatggaacaatgggtaatgttattattgacttattttgttaactaattacttttaattgaacaagaagcacatgtagttggtgggaaaagttcttagattgatgtgtttcttccatttctttccaaaaatattctaagtacatcaagtatatgactcacccccaccttttttaaaaaaaactgatggtagcttactgtgcacaccctttccattctttttacttaatagagtatcctggaaatcttttcttgtctgcacacatagatttacctctgtctttgtaacagaagcatagtcttctatgttcgactatacagtaatttactgtaaactcccttggcaatgaaaatttggttatattcacttttcactgttacaaacaactccagtaaacatcgttttaaatatttatttttatactttaggatcagtggaattgttggggttaatacttgcgtaatcatatacatgtgcattttgattgatactgccaattgtattttattccagtatatattttcatcagcagtgcaaggctgtgatttgaataattacccaaacctgtgtatatgttgtaattattacaaggtttaatctttagtacaatatgactttatttgtattcctttaattatgagtatcgttcattatacattgttataaatgagcattatttctcactttagttcctctttttgtgacagtgtgatactgattttagaactatttaaaaaaataaattgcagcatagttttggcattgctttattttgacgataatgctgctagaattagtatactctgttttcaatgagtgctttacattgtgaacataaaaaggacgttgaaagtgaaagagaaaggaaagtacggccagttttacttccaaattcaggaattcttgttttcccaattttcttactggaatgattggaaattaaggtgatttgtgttatttttggtggaggtgggccgtagggtaattgggaaagagatgtcaattgaaggtttttgtgctttaggagagtgaggactgtaaatggcttagctgctgctgaactttacagactgaactttcacagagctcttagaggttctctacaaatggaatccttttaggcacttgtgttataaaatgttgattgtaacatttgaaataagtgtgagttaatggaaagggccttgtctttgcctttaggaagtttctactttgttatcctaaacctgccccttcacacctctgtacttcaggaacccttgaaaagttctctctcccattgaagtgaaacatgggtctcatcagagtattcaaatttgtctctgtatttgttacagtgtctgtgtggaggaggagaacgttggctattatgtcctaattttacatttgattaaacctgtgactttttttttcttactgctaatttttaagtctccccacatcaaagttaaaaagaaaaataacacaatgaataatcttatcttttcatttatgaattagaatttatttttgactgtataatggatacttaaatacatttcacttagatatttatacctaagctaaactcattttcttatgacattaggcacaaaacattgcatttaataaatatctgcacagtatttattatgaatgagtgatggtctttttgagattagagcagataaatgcagattataggcaaagaattagtattttagcatcaatgctgtgtcttcccagtacagtatccagtctttccattgagaatttcccaaatttttcagttgtatattcttgttttaatcggattaacacagatctacttctaatttatgtataagaatgatgggtggttttgtcttatgaaatatagttattgacttttctgttattgttgttcaaatttatgacaaaaggaacaaaaaagcttagctgatttcggccggtaagtttaatgactactacctggaaattaagtgtgaaagttgaaatactcctttgctcccactagagggggattccttccaacttaggtaaaaatgctcttagactcagcgtgaaaaccttgtgtgacattgatattccctttgtattaaattgaggataacctcatgtttttaaaatcagctgattttctgtagttgctgatattaaaatcttacagaaatagaggatgtaaaggatacttgaactagggtacatatatatgtaaacaatagtgcttttgaacaaaacataaatacttttgtagagttgctgtaattaaattcgtttaaaggtatattaagagtttcaaaacaattcccccagccctcctggagatagaatctggggtgaagggtgccctggtgggatctgactccctcctcccacccacaaggtctgtcactgtctctgtctgctgaaatagccacagggagagttctaaatttcacacgaaagctttgatttgctctcacctcaagttgtcaaatatattaaagccttatctttaaatagagctctatttgctattgaattttcttgttacattgactttttataatatgataaaatatgcagaactcactgaagattttttcttgcaaagttaaactgtaatatattttaaaaataattctatttgtgttaaaaatagcacatcaagggtgaggtatgcagatatgatctatatgtgtaattcacaagcaaatgtcatacgatgttcacagtatttaagattcagcatatttcctgttcgcgtttttcctttaaagtctccaatgttgattagaggttttaatttaaaaaatagttgaggttagtaacctagcattgtgaaagtcagggcttgggaaattcaaacatgtaatcttttttccttttcttaaatgaaaagtctataataaggccttgtttctaaatctaacagccttggaaattaaaatgtaaacagaaatgctgtcagtgaaacttacaatgattttttctactataattgatccaacatttcagtctttagcctaaaatcatatttggtatcagcaacatatggttttctatgaaaacgaggctgctcatctccatccctaatggtagtatctttcttttgctttccgcaccaggctctgccagtgccagggggtggtcagtgagcctggctttcagtgaagcagttggagaagacaatttgcttccttgtttcttcttttgacccttttaactttcatactggatgaaagtcttattgtcatggccttcctttctatattttctgtccacaagggaagaatacaattttgttttatagcaggatacattagataggcctatgtgccttctacttaaacacctgccacacatgcctagttttaaaaggtttaaaactgacagtgaagcctgttacagtctgatattgcccacccaccccgtcttcctctttaaaaatactcagatgtgttctgttgccttctttccttgttcttttccatcgtgtattggtactttgcaatagtcaaagttaaaagctttacacacgacactgaataattatgtttaaaaaacagtaattatcaatacacgttttgttcctcgcagctttttaaaattcatgttaatgagctctgtcttctatgcatgagactgacaggcagtcttgaagttttgccatcatttcacaacttgttgcttagacactgcctgccttttccagagtattgctttcaggaactcttgctctgcaacattccagagatccagcgctgcccactctgatctgagcaggacaagaatctactggtagcacacatgcatagtgagattgctctacaaagggcagcttcccctcactgtctgtcagtaaaagaccaaaaggcatatgcaacatgttgtgatttaggtgagaaggatgattctactcactccctggattgtttttgaggaacttcaaccactacgtccacatgatggcagatggattcatttgataggagctcccgccgtcttatagaactgaaacccagacggtgactgggatttcagcccagctcttgaagatactcacagatctctctttcttgacaactgacataaatggaatgccagttttctcagaactctcaattctaggccatgcctgtgtctggtttctgtggctagactcaaagaggtttttgatagtgcctaaattatgtttttccttatgatttcaggttgaagtcttggcctcggaggatgcagcctttggactcaaggtgtgtagtctggtgtagttcattgtggaggtttttgtcagttcctcctaggtggatttgaaggttcaacagaggggacttattttttttttaatcataatcaaaacactgaggtttaaaaatcttcacaagtttaagatttctcttattgtgattaagattagactgtggtagtattttcattaccttctttgttgtgtagaaagaaacaatacaggaaaacaagagtttcgtttagcagtaattgacttttaaatttcaattcggcatagcacaagatttgcttaaattttgccccagtttggggctactgaaatgtaagatgttatcagagtgctgtatttagttcatagctccagtgttattcattgatttattaaacgtccccgcttcagacagaacccctaccgtccagttacaaccggattgaaaacccagctccttcccgtgaggacctcatgaccagctgacagatctaagcctataagcagataaatcatcccacagggtagctgtatccatgcaagaaacatgccagaggctgcgagtcgggtggagtggagaatgggaaggctttctaggaggtggatccctgggctgagttttgagggcttaggttatactgaggcaagaaaggagggcaggagaaatgagagctattttcgggtagaacagccaccatgaaaaatatctgaggaagctaaaagtagttaagtttctgtctgtgtggcaagatctgagactggagaggttaaagataactttctcctataaaaaatggtaagctattaaaagattttaagccaggtagtggtcagatttgcaatttagacagatgactttggccactttttggaggacggattaaccagagaccagtcaaaagcagttgaatagacccagtaaaagtgaacacaggcctgagctggcatagtagaagcagtgtcagagggcagaggactggcaaccgcagtgtgcagggtctggtgcctgctggggtatgcagagtaggaaaagaggagctcaagatgagtccagggacaatatggtgtcaccctgagatagagaacacaagaggaagaattacagatttttaaaaattataatcttccagacctgaattgtcgatcaaattacttgccttttgtacatatttcctgataatttttaaatttgttaaattttgagtaaattgggaggcatttgccttttgtacatatttggtgataatttttaaatttgttaaattttgagtaaattaggagacacttattagagaactctgatttcattttcatatagaggtgtagaagtatagggtaggtgccatcagttacttcggaagtcagtttgggaggataggaaggttggtagaaactattacagaacaccaggtattggtgatgaccctcacgtgactcctccatgtgctacatctttggcttgaaaccaagttggattatttatatatacatatatatattttaccatttttttatcctatatgcttgacatttcaaaagcacagtctaccagttgtacagtaatgacaggtaagatgacactgtaatgctaccaaaagcaaagtttctgaggttacaaatgtagcacaattttacattcataaatatatgaagaaaattaaattaatactttataaatacttgatacaactcaagtttataaccctaataaattttttatgtttctgtatctgccaaaaattactaaaagaaattattctaaatagaacctaattcagtattatttacagtatttaacatatggttgtcttgtgaatttttcattttttatttaatgcccagcatacatgtggaatattcattgcatttttaatagacctgtagggtcagttcttaggagctcattttcataatccttcatacttactgagtatgcagcaacgttatagaagattagtgtagccagcagctctcatagtctgccctgctgtgtgaagcttccgtgtttgttctgtggccaacctaacaggttccttttgtagccttaacttttttttttttgagactgggtctcactctgttgcccaggctggagtgcagcggcgcgatcatggctcattgcagcctcaacgtcccaggctcaagcgatgctcccgccagccatgtgccaccatgcctggctaattttttataaaaatgcaggtctaactatgttgcccaggctggtcttgaactcctcgcctcaagtgatccctggtcttggcctcccaaagagtagtgttggcattacaggcgttagccactgctcctgacctcatagccttaaatttaataagttgaaacaacagtgaaaatttttttcaacaatccagtgactttcacagtaatagatgcttttagcttttgctgatctatactgaagtgtttatacatataattaaaaatgggaaatttgacatttctttttttttttttttttttgagacggagtctcgctctgtcgcccaggccggactgcggactgcagtggcgcaatctcggctcactgcaagctccgcttcccgggttcacgccattctcctgcctcagcctcccgagtagctgggactacaggcgcccgccaccgcgcccggctaattttttgtatttttagtagagacggggtttcaccttgttacccaggatgggacatttctttttactgcttcattatctggaagtcggcaagtatatttttgaattccaaaagctacctaccttccttccttccttccttccttccttctttccttccttccttccttccttccttccttccttccttccttccttccttctttctttcctttctttccttcctttctttctttccctccctccctcccttccttccttcctaccttcctacctacctaccttccttccttccttccttctttctttctctttctttctttttctctctttctctctttctttctctctctttctctctctttctctctctttctctttcttttctcttccttccttccttccttccttccttccttccttctttcttttctttctttctttcttttttctgtcttctttttttttctttccaagacggagtctcgctttgtcgccaggctagagttcagtggtgcgatttcagctcactgcaacctctgccttccaggttcaagcaattctcctgcctcagcctcctgagtagctgggactacaggcgcgtgccactaatttttgaattcttagtagagacggggtttcaccatgttggccaggatggtctcgatctcttgaccttgtgatctgcccgcctcggcctcccaaagtgctgggattacaggcgcaagccactgtgctcggccagaattaccttatttcataaaggtctaggtattcagcgttaggtttttaaacgcattcacaattggtgtttcttcctgtttttgtaagcactgggaaaggtaactcaagtgtctaagtcactgtggtaacacatggcaccctcttggcaaatgcacagaacatttctgagcctgctggagtgtgtgtcctgtgtatgtcgccgctccttttagtgatgatctttaatgatcctttatctttctgtactttttttcctactaattctttatacttgtatgctttgccttctcttaagcgaaattaaatttacaagcttaatattgacttagcacaaatttgtcagtcttactggaaaatgagttaaatacactgggacccagaaatgaaaacaacttatttttgtatgtacatgtggcgaaactacaacccagggaaacaagtgtgcagtctcgcaaaactatcatgactagcaaggttgatctgagagtaactttttactctagtcaaatggcaaatatctatgttctacttcttacatcttaattttgcacaaatagagattcattgttttgttaggcttatctcatttaaaggtaacttagaatttgaaatgctgaagctgtttcacagtatagtagacaataagcacttccgctgttttcccgtggttttagttttttcctctgaatttaagtaacttttattttcttgagtttgtttctatacaggtctaattaagataattatttttaaattatatctacttataaacaagaatttgaggtgaatagaagaggtgcttcaaaataaaaaatgggtgaatatatgcctttgttagtaaagttctgaaactgtagaccactattcttattttcagctttgatcatgatttgaatatattataaagtttataattctatagaaaaataaatcagaagtcccagcagccaccaacatgggttggttctttttataggataaccgtgccttgtatatcattaatgaactaactaaagctgctgttgataatgggatgataaatcagctaaacatttatatgtgtacatatgtgattacattactaaacatagggaaaagactgaaacattgacttgttgtttatggattctacatatagtagtatagaaaattatagtaaggggtgtaaacaagaaaggggtatgtaattagccctgggtcattaaaaaacatgtaaacataacttaataaacttcttaataaatttcttaagaaatcttactaatctaataagttacttcaaaatttcatgactgtgaatgttcttcatcttctgattaggtggctaagtccagaattagaaaaaagcacgtttttatttaatccactctcatatgagacgtggacactgttgttatccccagtgttaggtaaggaaacaggaactcagagtctagaacttgctcaagttcacgcaaccaatcagtaacagaactgggatttgcaccagcagtgtcagccccagcaccttctctgttttctgaatgtcctgatcactgatggaactgatagggtgtaccctgtacccgcctctcagtctttactccccatcttcttagccaccatcaccactgccccactcaactcctcttactaaggtccccaacgacacacccagatctagcagagcagttcactacttgccctgtgcctgcctccttgcgcatttgacctaatggacttcttccttggcacactctcttcctgtggcttcctcagcagcgttttgttgattcacctcctacaggtctggcctcgatttctcagactcgtcttcctcttcacagacaggcagtaatgtgttcgattctcctctctgctacataagccgctaataccccacgttacaccttcccctcctcctccagggtgtattcttaaatatcctgccgaatgaatgaatatgcataaagccatgacaaagatgaaaacatgtatctcttgttcaatacagtgtatttcctggggtaaattcttagggcttgcctatttgacaataacgtaatttgattctcaaaataatttttaaagacttttccctttgaaagatggagggacagaaatatgtattaccagtgtattcatttgctatacctgtcttccgggctaaatggacatcagaattccacaaaatcaaaaatattttgatagggtgttttggctgacatgttctttgggaagaaaactctgaattttatgactctttttataatatttgatataaactattaaaaatacatgtggagaggtcagtttaaaatgaattacaaggataatcaaggggaagcatattgtattactctaaaaaagaatgagaaaaagaaaaatgatgcaatttatgctatcattgggtcccacaagatcacaggagccctccactcctttttttttttttttttgagacagagtctcactgtgtcacccaggctggagtacagtggcgtgatctccactcactgcagcctccacttcccaggttcaagtgattctcctgcctcagcctcccaagtagctgggaatacagacctgtgccacaacgcccagctaagttttttgtatttttagtagagatgggtttttaccatgttggccaggctggtctcaaactcctgacctcaagtgatctgcccgcctcagcctcccaaagtgctgggattacaggcatgagccaccgcacaaaggctacacttaactttaatcctctttggtgataatttttaatatttgttttaggcacctaaaatttattactataaaagagaaaggtctaagctaaagtatctgaacataagatgttaaagtaaatcctacacttgtattactttttacctgtattttggttgattagatatcttagagaaaaataacatcagcgttcaaactggtcttccaacccccaactaacagagtcccttaaatatcccatgccctttgctgcccttagcttccctccagcctagtctccaccttgcctttcccctgaaatgcttacccttcctcttgctgcatttcaaaatcctgctttccctccaggctccattctaacctctctcttctatgatttgtctcggcatgggcgccttctgagcaccatcctcagagctcaacagttctcactgcctttaggactcatttggaatttctcatctgccaacttgttttggtgttcttttgtatttgggagacagcgtgatatggcctagcccaattctattacgtggcattttcccccataatatggtaagcttagagaatccatttttttcatctttttatatccatattgactttcacatggtaaacagtgcataagtactgatgattaagagttttactgatagtgttaacaattgtcactgctaagagcataaaatgtgtgatattaacatatcactactgtgttcttctgtattctgggatttccttgccgattctcctgttatctgggctaatatgtgagcttggcatttcctatttaagctctgtaatgcccaccttaaggaagatatattcattgttaatgtttgttgaagctattgagtgggtatggctggcatcaaaaactagttggttccttttaacctggcttatcttaaatatgttcattaatcaggttctgcagttgtattcattcatatcactctacttctttccactgctttccattcaaacaaatatctatgggatatacgtgttatttgtcaagtaccagggatgcagtggtaagaataataagtccttgcttccacggatcttacattctggacacaacatttggaatgatcttatgtcagagaaaaatccaagaagagatgcaaagtttggatataattgtatgcttttctgttgtttaattgtcttaattgaatctatttattgtattctacaaaatggaatggattccagtttgacctaaggaaattataaataacaaaaggattagtcacccgtaaatataatttcaaatagaataaaagtggaaaattttattttatctttttaaaataaggtattttcaactgtggaaaatgtgtagcctgaggatcatatttggcagtgacttaaatttgagctgctttctgtcttttgacatctgatcattatgaaagtatctgtatttcacttccctcatataaaaacaaaatgatgcagtcgttaactataggatttatcatactggctaaggaggaaacagaaaaaaatacaatggcaacccatgtctgaatgggcctcctggctcaagaaccaaataatgacctttgggaaaaagcgggaggttcacttgtagcttccttttctgatccatctaacttagagggctccagtttgaattgtgttaaaagtccatttgtttttagtcatttctgactctgtatcttttgttacatttttccagttttaatcatttctcattgctcattttggttctgtagagctgtgctatccagtgtggcagccaccagccatgtgtggctatttaaagtatttaaagctaaatcaaattcaaatatcatttcttcagttacactggccacatctcaacaattacatgttgctggtggctgccacactgccacagtgcatagagagaggcgtccatcttaacaatgagttctgttgcctgagctggtctagaaaatacaggttccaagtatgtagatgacacagacagtttttagcataacagccatttatataatatataaatgttctaataacaattagaacagccattttaaaaattgatttaaacactagggatttgaaaagatagtagaaaacagaaggaatttgctgttcaggtagagtgctataaagcagaggggatgttctgcttaggaaagaaagataaactactataaagttgacaagtttcattagattttgagaatagaaaagttttaaacagggtcatgaaatttgacatccttctagagtgacatttgtgatgggtcattaattcattgatttgcctaagatatgccccaggctaccaatatagtattttggatttagagtgtttagttttgcattgtaagattctacccaataaaatagttatttcttttatgagtgtaaccacatgaaaacatatactaattttctgtttaaaaacatttaccatatatattttttgtcaagctgcattaactctggttcttctctactctttgcgtcttcttagcgggaccttttttttcttctgtgagacagagtctctctctgtcacccaggctggagtgcagtggcaccatcttggctcactgcaagctccacccttagcgggatgtgttttctagtgaatttacttggctaactctctgagtgagtgtgactataagttaggtgaaagtatatttaagataaccaatgtcattgaaacaaaactagcaaacagtttttttgaactcataatcttatgaactcatattacttttcataatatgaaagatttgtttttacattttaatcttttttatttaattaaaatctgttcaaaacctttagagcagtagaggaccaagtttattccatactgtttcaatattgactcaaacttaaaattatagaatatatattgttaaagcaaaaaatttactgtttccgctaaaagaaagattcaagggggtgtggggagaggaatctgcagtgtttctctaggacctcaaggatctcaagttctcccggatgtgggaatccaggaatccatattgagctcttctcttcttttgttagaaaatttcccagcctctgcctctgccatctgctggtagttcagacagttacatgtttgagtttaaaacaaatttgctttatttttatttagaaatgatttgggggaaatactttatgtatatttacctgtaatattttgatacagttttctttgttaggtttaattatcttttgaagggatattttagctttttttccaattttgtctttagaggaatacacaagtctaaaactcagaaaagacaagactgtgaggccaaaacatatgcagtgaagaggcaggttagagccctgttaatgaaaggcctggagtggctgatgaggagttacttgagagctgttaggggtctcacctgatgtctggctttggattaaatatggaataggatttttttcctgccattttataattaagactacttgactgggagttgaacagacccatattctactgtaagtcccattgtgaggttggagaattgatttctagacatcattaaatttatttccagctctaaaattcttcaggtccttaatgctaacaggcctcctgtattcattggaagtacaagtgttttaccatttgttagtcttccatttcttcttgctgatgtttcctagactaagatattcttgttgtcttgggaaaaatagaattttgttgttgtattgttgtccacaaacaaatcctttcattaagtgaagccaggcaaaaatttttaaaagaaaggtaaaatatagaaattttattttctgccacctttagtcttctttcctaatttcctttagagctgctatggccagttacttttcagcatttttctcaaagagaaaatgtaacctaagattttttcaatttctttttttcacaatgaaaaaggctgagggagggaaagtgacttattttaggcactgtctagtggtaaagctcagctagaagttgctgcttcccaggcctgtgtactttatgaaaaaattccagcaatgcctgtgttgttgtttttttaaatcagtcctctcaagtttaggaactctatattaggttacattttacagaattggcatttcgcagctcaaaaaatggtgtaatgttggcaatttcatatggttcaacccaatgtactaggactctaatatcattttagatcagctttcaatagtgaaaacggtatttttctttaaaagtagtttattccaattggaatgggtatgagcacactctgtgaggtattaggtgatcacgagatgtttgtggagcttaactgacatgagagtacccagtaggccagaaagcccagcaaagaaggtgtgacgtttccagaatatgttttggcattatatgcaaaatcagaagtagtatattataatcagaggagttcttggtgtaataggaactccatttcttctagaccaagtattctgtcagatgatggtagatgacagagtgtttagatagattcattgacagcatcgcggctgtcccaagatctaccaagtccactgtgcagaaatgtttgccctgccttagtgatggtgaagataaggtgagtggagggaccataatttagtgtagttcatgcctgcctttgtcagattctgttcatttttgtaaaaagacgttaggaattaaacatggcctcacgtgctatgtgtctgaaaagtggtctttttaagagagcaaggagttatgctggaagcaagcttatttacttgtataatttagagtttgattgactccatgtatctctggggacattattttggcactagtttttgaggacttaattttctagtaataataaaaatgcatatattctcttatccccaccctcaaacacctgttcatttgggacatgcacatgtaattagaggcgtgtttcaggacttgcctgtaaaattcctttgcatgcagttactgtgatcatattagtaatcatcaagctacttgagattttgttgggaagaagcaaagaaaatatcctagggaagatgggggtgattttgattgcgtgtgttttaggttctctgcactgccaagttttaaagcagattctgtttcttcagatggtgaaagccctcctccttccctcctcctgccttaaatttggcttcttcccaagccatgtcaatttttgcaagtcagttgagaatgtcaacgtggctggtgttgaaagagccaatatgttggaatatgcttaaagccaagtagaacatttatgtgaattaaagaatatatcagggatgatttttaaaaatcagatttggattaagaaacctgttgaattaatacttgcataacagatgtatcactgataaatacttgtaaaagatattcccaaataagcaataaaagtaccattttacaaccgaagtaatgcatcctgtgggtccatttgcaaagatatgccaacagaaatgcatgcagagctctggaagtgataatgcaaataaaacatttcacattataacttaaaataacaagtttggaaggaataaaaagtctgggagactatttgttttgtctaaattctgcttttactctggtcttttaacagttggcttttgataatgtattactgccttagtgtgttcctgtgtattgaaggaatacattgtctgacagaattgtggttgaaaatattacaagttctaaataataagagtaataaatatcatatcttgtttgctttgttgtcatagtcgcctgatctcatgcttccctgaattcggctggtgtcttgattacgatggaatcactaagcagagagttttgccatgtgtgatttattcgtttgtgcatagccacagcagagcatccatgcagcccgcagtggctctgtgttccagtgtgccaagtcaccaagacttgctaccttaaggccaggcgcagtggctcacgcctgtaatcccagcactttgggagactgaggcgggcagatcacttgaggtcaggagttcaagaccagcctagccaacatggtaaagccccatctctactaaaaatacaaaaatcagccaggcgtggtggtgggcagctgtcatcccagctactcaggaggctgaggcacaagaatcacttgaaccaggaggtggaggttgcagtgagctgagatcatgccactgcacttcagcctgggtgacagagcaagactcagtctggagaaaaaaaaaaaaaaaaagacttgctgccttgatttgctgctcactgtgcccagcaaggccactctgccatggccgattctagaccgtggccaaggtgggatgaagccttctctctctctggccagagtgctcctcaagtgtgaccttcctttggtagctgggcagttttctccttgcagtaggtgtggccttagatggccatgtgaaaaggaggggtcagtgtgaggaactggagagaagtacggggagggacaggactggcccttgaaatcggcgtagaggaagttaagtcctacaggagatttcttttttttcccctagctacacatggcagtttaaagcatttaattggctgtttcttaagaagccatgtacatttttataagaaatgtctcttaacctcccttcactcttccacaaattaagttttcctttcagaataaatttttttgtatctcattgaggaagaggggaggtgaagaacagagcagcaaatgaatacatattatttataatgagaattggatataggcttatcttatccattaaatatcacggtaaaatcaataaaattttaagaagtattctaaaattaatttcaaacaaattttcgaaacatttctagaattttctttttaaatcttcacattacatattaaagcttctcacattgtattcctatttttgtctcatttaagttttaatctcctcataaaaggataagtgtcttttcttcagtcatcttaatgtgttaacctgcacttcatatcatcatgattttaaaacatgcattgaatgctgctacagtccaagaataacaacgcctgtggcctccaaggagtaagggacccctggaacatcagcaccagcaaaaggaagagagacactctcagttgtggggtgtctctccctgactcagcccccacctcactgagggtcttccatccccacagtttccatctcagatgcccagaagaatgggaggggccaaaggagctccactttgtatatcatcaatgaaaccccctgtacccagtcccccaacaaggaagaacaacagataactcaatttaaaaaatgttacttgtggctgggcatggtggctcactcctagaatcccagcactttgggaggccgaggcgggtgggtcatgaggtcaggagtttgagaccagcctaatcaacatggtgaaaccccgtctctactaaaaatacaaaaattagccaggcgtggtggtgcgtgactgtaatcgcagctactcaggaggctgaggcaggagaattgcttgaacccaggaggcgggggttgcagtgagcggagatcacaccactgcactccagcctgggcgacagagcgagaatcttatctcaaaaataaaaaagttacttgtgataaatgaataatttgggaagaagaaatcctgagttttatgatgcagaaggtatttctttatcatgtagacacttagagggcttcaattttggtagtaaataaccttcattaaaaaagttaatttttttgttttaccttcatatgagccctgtaatagtacttctaatgacatcatactcataaaatgacttttttgtttcctgatcaacagtggaaaggtttatgatgtgctatgtaatagtatgtgcaaacatcgcaggcacaatattaatagatgcacatatatgtgtgttacacattaaatatttcccattcacacatgtatgcattctttccttttacataggaggcctagagaagttgacctccctaaaggataagttctaaaaggcaggaaatggagatctgccaggcttgttggctagagtcatggacaagagcaaggcctgtctgaactgccactcagtttttattctgcgcatttgcagggctggtgattagagtggctttcgcccaattatgctgtgattattctgctgcactgtaattgactggggagatatgctaatacctgtcatttgggatgataaaagatgagcgggggacgcaatgcattatttagctggctgtgtgatagatgagggatgcgcagagtgctttaattgctgagaagagaggttaagctgaacgaacggatgaattagaaatgagtttttttatggcttgtggaaaagtgaaataaaggaaaatgtgccttaaactaaaacagcagatagaaatgagcacaacgaaactagatcttccaggcagctccctttatccatttaaatgctaacggaaaatgcagtttggaattcagtaaataataattggaataagaatttacaatggattctcttattaagcaaaaaaaaaatgttaaaggaatcgtttttattttagatgactatttgtaatctgtaacctcttaaattcactctgtactttaggttatactgaaatgtaatatgcaacaattctgaattttatagtttgtatcttttgaatgtttgaatgctagacttcttgtgcctgtgtatctttcaataaatgcaggcagaggaaagaaaaaaaatgaatatttataataccaggagaatgtaaaaatataattagagagtgtacagatgattcttgagtaacaggatctgaggcagttggtacagtcctcgtgcaccacactcttaggtattgatatttttatgcaaaaataattatggagagtggtatatttcttttcatgttgtttcttttgtcacatgatatattactttgtaaccatatttcataaaagtatttaaaattctcttgttatctgtatggttatttatatgattagatgtattttgctttattttagttttgtcaatttaattaataggtaattattttgaaaatgccaccagaacagcagtttgcagaaaaagactgttaaaaactgaaggctgaggccttctatatattgtgggcttccaggtacgtcgtattttaccaagtaatgacgtaggaaaatgtctccaattgtgctattttgtcttgtaggtgaagcaatgaaaataaaggttggataacagaggttatttatatatatatgtagtaaaatgaagaaactgatcctcgtatattgttgaattatctctagacagtcaagcttctcagcctgtgtgacttatctcatatagaagaattgatcagggaatagctttcaactagggtattgaatggtaatagatccgtgtggaaccaagtcggcctgttggactggatgtcaactgtagacagatgccactctctgctactcaaataagttttgttggggctgattactttcccccaatataattggcacctttatttgcacattccttgtgaaacaaagtgaagtttcctatggatattttcatcagtgtccttggaattccaaagtggactcttgtagctgtgtaacttaaacaggcataatctgaatggctgcttatacagaatatcttgtaaagcaaaacagaagttgcaaaggaaaagatgcactttgcctcaaagaatttaagaaatggacaaagattggacaaacatagcaacctgtaccaaacaacagcacctaagagcagttttcgtttgtctgtctgttttttgagatggagtcttgctttgtcaccaggctggagtgcagtggcggagtctcggctcactgcaacctctgactctctggttcaagcagttctcctgcctcggcctcccgagtagctgggattacaggcacatgccaccatgcccaactaatttttgtatttttagtagagacggggtttcaccatgttggccagtattgtctcgatctcctgacctcgtgatctggccatctcagcctcccaaagtgctgagattacaagcgtgagccaccacacccagcgctaagagcagtttttaccagcctgatttacaacagtgcaaaatatcatgaagaattattttattgattgattgattgattgatttagggacggagtctcactctgtagcccaagctggagtgcagtggcatgatctcggctcactgcaacctctgcctccagggctccagcaattctcgtgcctcagcctcccgagtagctgggattacaggcgcctaccgctatgcctggctaattttttgtatttttagtaaagacatggtttcaccgtgttgccagggtggtcttgaactcctgagctcaggcaatctgcccacctcagcctcccaaagttctgggattacaggtgtgagccaccacccctggcctatcatgcagaatttaagctagctattctgaagatagcaatagccctttgggggatgtgctgtcttgactggtttctcttgtcaatagtataaacagagcagtatataaaactattaacttttctacatctttttaatacaagtagtttataatttcagcttcctactaggcaattattcaatcctgcaactttattcctgaattttggctataattattatcacttgaatgtagaaatgattccctctttaaggaccttagtttgagtggggtttgctttgttttatgagattaggaaaagaatcatgtctgtggctttttgttgcttacgtgtataatatcaagcctttctataagtttgatttattatgatagcatgaaatttttcttctatgaaagtggatgagctgggcactgtggttcacgcctgtaatcccagcactttgggaggccgaggcaggtggatcacctgaggtcaggagttcaagaccagcctggccaacatggtgaaaccccgtctctactaaaatacaaaaaaataaaaataaaaacattaggccgggcacaggggctcatgcctgtaatcccagcactttgggaggctgagatgggtggatcacctgaggtcgggagttcgagaccagcctgaccaacatggagaaaccccgtctctactaaaaatacaaaattagccaggcctggtggtgcgtgcctgtaatcccagctattcggaaggctgaggcagaagaatcgcttgaacccgggaggcggaggttgcagtgagccaagattgtgccattgcactccagcctgggccacagagcaagactctgtctcaaaaaaaagaaggtggatggccaggagctgtgtgattctttgccttagattaggtttttccccttggaaatgctgtgtcttaaaactgagatttgtaacacaaggcagcatcaaactatcttcaatttccttagcatcttttaatgttcttactgcccaattaaatatttggtttttaaaatggtagtgagttatagttttttgaaataatgtgtttgtattattttataataaacatgtaaatctggtgataggattcagagctacaagggacatgagaaattatgtaatctattgcccctgtgttataaaagtaggaagtgaggctcatggaaggactagtaaccacctagacctcacatctcctcacttcctatctggggctttttgttctatgtctgaggaagtggttcttacctaaagagcaaggtttgtggaaatagttgttcacattgagctgtgaaaggcaaaagaaccacagcctaggcctacttactagatgtcactgttacaggggtgattgtcagattggttaaagcagaaatctttgaaaatgatgcaatcattatacattttattttagcataaaacacataaatgtctattcacgtgtacctccctcctgtccatggttcaccgctgtctcagccgtacctcattctgcagcagcgtttcactagctcactcatccccagtggtgggtctcttttcacatggatacatcacctggttccattttccattcagtttagaactggagtaacttgtagcataaacctgcagaggagggaacagaactcaccactgggaagcatcctcctcagctggcatcagccgggaagtaggggggctttccagagaggagccacctcaccactgaagccagcagatacctcaggtggagcttagtgcctgctgtgtggataaggggaccatttgcattggtttccctttggaaatgatgagtgattatctttccttctacttcaagccagatctccaataatatgctgctatagaaaagatacagatcattaattggttaactagacaataatcattagtttacccatcttatttttatgcctttgattttcctttccagtaacataatctttttttgtttctgtctttgtcgtttaaattcacccgtagaacttgtacaaagtactctttagaagtagctgctcaaaatttttgctttaaaaagaaaacacccaaatatcaccttaaatttcaaacctttactgctcactgtagtaactgctctctagtccttaaatttgattataatattcttgataacaatagaaaactaactttaacaaaaaggaaaatttgaaaattcttacagatctcctctggtgagatttgaaaggtaagtgaggtttcaaatgtattaattttctgttgctgagtaacacattacccccaaattcagcagtttaaaactattcttcctgagtatctcacaatttctgtagccaagagtccaataactgggtcctctactcaggatctcgtgaagttgagataaggtattgtcagggctgtggtctcatctgaggtttagggttctcttccaagctcacccgttggcagaatttacttccctgtggctggagttctaaggttcccaccatcatgccgcatgctaacccagcacccttctcagtttctggaggtgacctgcagttccgtgcctgtctccacaacatggcagcaggcaggagatttgcattcaatctctcccacctcttttaagggatcacctctttaggtcagacccacccaggaatatctccttttattaacaccaaagtcaactgattagggaccttaattacatctgcaaaatcccttctaccctataaagtgacataattgcagaagtgttacctgtcatctccacaccgcccccacctcatacttagggtcaggcattatgtagggtctgtataccaggggctgggagttttaggaaccatcttaaaaatctgcctcccacagctactgatttcacatttgccctcagattttagagatacaaaggtcttttttttacatgtactcaaaatgtccttaacttgaatttttctaaaatgcagctttggaaaaatgagagtgggatattatggaacatatttgactgacaacattgaaaagaaatgataagcatctttaacagagctatccatcatagcagcagttttattgttagcttctgaacctttgccatagagtgagataagtaatttcttactacaggctcttactgtgcagttgatgcacttctggggtgggtggaggatgtgctgcgtttctgttttcagtgctgctgttgaaggtttttatgatctcagtttctccttccagtagttatgtttggttatgatctcatgaatcttcataggcatgcaaataatagaaaaagaaggccctgctgtgtctggttagtttgatagacttgaaatgctcagaaaaaatttttgtctaaacaatattttaaacattttgatgtttagttttgactaatcatttttggagcatataaggagaaacttaggcaattgaattttgtttaatttttttttttgttaaaaacttttcttaaaaagctttttttaactttttttgttaaaacttttcttctttttttgttaaaacttttcttcttttttttaaataagtttaagttcaggggtacatgtgcaggtttgttgtgtaggtaagcatgcgtcatgggagttgtgcaggttattttattaccccagttgtttgaattttttttttttttaagacggagtctcactctgttgctcaggctggagtgcagtggcgtggctcactgaaagctccgcctcctgggttcacgccattctcctgtctcagcctcccgagtagctgggactacaggtgcgtgccaccatgcctggctcattttttctatttttattagagatgggttttcactgtgttagccaggatggtctcaatctcctgacgtcatgatccaccagcctcagcctcccaaagtgttgggattacaggcgtgagccaccacgtgtcctaacttttaaataattatatatttttctctcaattctgtgaatcaaatataatacaacatattttaaaaatccaaactatcctttatcttttaaaaaaatcaatcttttcaattatgtttgcaggtatatatgtatatacacacatctataactgtatagatgagatagatagttatgtaagatgaggtttcactatgttgtgcagcctggctttgaactcctaggcccaaacgatcctcccacctcagcctcccaagtagctgggattgcaagtgtgagccaccatgcttggcacgttattttgaatttatctttgctaacactgattcctttcagaattactttagagaaaaataatatattttaaataggatttgtatgcacttgatttcagtcctttaggtgggggaattccatagagccgaaaatttaaaaacgtatataaagcaagtctcattatttttgaaaatgtgtcaaaattttaaaatagccataaatatttcctgtgcttgattctagaatcaaacaaaagtttaggaggattaatttcagatagggttgatgataccaacagcatactctatgagtacattgagtggttttctgatattccagaggaattactaatgttgacatgaaaattactagttaattttctttcttttgcagaattttttgagttttgatgagtattttatggatgcacccgtttttgggaactcatgtgactacaagatgaactgtagtacttaaggaaagcagtggcatagtaaggcaagacagacacccaacttccatgcacaccgaagtcattgtcctgtctgatcctgtggtggcttgtctgctaccaccctcacttcacctccagtagggccacgaagttcagatatgcccagatgaccagctgaacgccatcaggcttttctctaaattattatcagcaactgtttctcaaactactttatcttggtcttttttttttttttttgagacgaagtctcactctgttgcccaagctggagtgcagtggtaggatcttggctcactgcagcctccacctcccgggttcaagcgattctcctgcctcagcctcctgagtggccgggaccacaggtacacaccaccatgctgggctaatttttgtatttttaatagagacagggtttcaccatattggccagactggtcttgaactcctgacctgaggtgatccacacgcctcggcatcccaaagtgctgggattacaggcgtgagccaccgcgcccagccctactttatcttaatctttgtgccaaattatttatttcctgcaactgtgatgtcagtcaccctctttaatatggcctgatgttcacagaagcaagccatgtgatccgcgggaggcagcttgaggctcacagcgtcttcctgcctcactcacccgtgctgggtgctgaggacactagcggtggcagacgtggttctggccctcatcatttgcaatgcagttggagagatggggctgggtagcacctgaccagcgatatgtggttaataagacatagaagagggaaaataccacgtggtctggggtgatcaggcattgaaggagatttgacttagctctttgcagaggagggtagcctcacagacaggcaggaatgaataggcagatctagctggggctgcggattttggtaggaaagatttggaggccccaaaacaccttgcctagatgtttcaatgagatgagttatagccaaaggtacttcagcttggaaattgtgtttttgttttttttttttgataaaaatatattcatttatcgacagtgtgtggtatctgttggcatgagaaaagatttaagagacgatatattgattagttgtgtatctttagaatcaaatgagaaaatgtgaaagtgcttggaaaatagtaaattgatgtataaatgaaagttttacattatcatgtgtaacagtttgttatataatagagttgtgtgatgtcaggaataaaagaagctggtgaaattactccattcgctagaaaatggtttacagaatcagctaagcccttgctttttagagagataaagttacttatcgtgttttcctttcttacctgaaatcttcattacatagtgaattgtttgtaaatatttgatagtatactgcagaatatgaggttaaaagagtctgattcatgtaatggaaattaatctattggtaagtcaaataaatgtttattcttatattttaccaaaaggtttctgagattagagtattgacaaagaggttctgagactagtttactcaacatttattaattgttttcagtgggccaggccctgtggaaagctctggggttaaacaatgattagcaagatacaagtgaccctaaatttccttagcacgccccttctactgcctgggagacctggtgggctctaaagctcctgcctggcctgggaaacattttgtgagggagagagagcaagctttcctgaatatgagtgattatgcttttgtctgtgcatttcagaatttacaaaatgctttctaggagtttaaatgagatagaatgcattttgttttagaacaaggaggggaaaaatttatttcactgcttgttgcttaatcagcatctacgctgccacttcacatcagcttctgtcctttccaagtgaattagttcttgtgggcagcgtgtcaagaggaagtgtattgttcctggcagggcacttgaatttctaattaccagattcctgacttaattgcaattacctggacaccgaggcagggtgaacttttggaaaagaatgtaattagtgaaacaggaactttactgccaactccctgtctagataccagtactaaagagaccgctgataagtccacatctgggaaaacaatccatcagtcgataaaaacagttcttaaggtaaattatatagcatagcgcctctcagctctgaattcagaaaccaatacgatggtaaagcagagagtgttcaatttttacattgtaatagggtatagtagacatgtgcgcaactttttaagattaattatctggaacaaaaataattattaataattatttgcaaagtagtctctgtttgtatgcaaacacgaacattacatactttgattaataaatgtaaaatcccaaggtctagtgccatagaagaataaataattttccaatatcacttgtttcactagtagtttttcttaaataatacttttcaataacaacaatttcacacacaaccacaaagtttcaatctggttaacatatagatttaaacttattttgaaagcattttaatatatgtgaagcaaaatctgaacttttttttttttttttttttttttttactattctttcattgtctcatcacattcaagagcccgaccatgctgtcttggcacagattcacaatcctgagatggtaataaatatctgctgatggtttactttacacatttttgattcagtccttaaccccctgctattttttccttctcagcttctctgagctgtccttcctttccatctcaacaaattccttgtccacaccaaggttaattttgccccatctgtggttagttaactcacaaatgatcttttacagcttcttccccctggagctgctggtgttttttattttcagcctttaaaaaaatgttacagagtggagtgctctgcccactccccaccccacaacctgctgtggcacctctggatgggcagagggtcttgtgtggtctgtctcacctcctgtggactcgtgactcaggctgtcccctcaactgatcaaccaagacaatctttttttcctgtcaaagtttaattccttctaattctttaattgtaatatatcctatttgtgtctttcttatacattttatcatatatttatttttactgcattaaattgagagcctggctgcatttgaatttacatttgttagctgtttgcataatggcaattataatagtaaaattttaaatgggagcaataatagtaaatatctcaaagcggtgaagatagagttacattacttatctgcagcacttagaatggtacggagcacatggaagtgctccacatgtcaaccctgcaaggtatggcaggtgatgtcccatttcatagagaatggaacagaagaaccaagaggtgaggtcacctgcttgacatctcgcagttgtggggaggagttcgggcagtgggcgtgggtattttaactcctggttattattgcctttaccatctcagggttgtcagatttagaaaaaaaaaaaaagattgcccagttatagttgaatttcacataagcaatgaataaaattttagtataagtccaaatattacatggcacatacacttaaaacttgttatttctctgaaatttaactgagttcccatattttatctgataactctaatccatccaaagtgcctactctgtgccattccttaaataatataccagaaataaaaaagatagctgattccaccctttgtgtattttttcacagcataaaaaagcctgtttttgtttttcagacaacccaattaagaacaattaaactgaaatgtctgtgccatgttttttccaaacgtgcatcgtgtggtaggaggaaagtatttttatggaagagtcaccatggtaaatttttccagcagctaataaccactgagtttgcagtgggaaaagcgagacagcaaaaatgaaaggagctaaagacagcccatgcgtgctgtcactgctgtcactttttggagataataaaatgtttgacaaagcagtcatgataagccgaatctactttcccaagtacatagctacaacattagattcttttgctttctcttgctattgtatgttcccctgtttctgtttctccttttgttttgttgttttttttttttagagacagagcctccctctgtcacccaggctggagtacagtggcgccatagctcactgcagcctccaactgctgggctcaagcagtcttccagcctcagcctcccaagtacttgggaccacaggcacacaccaccatgcccagctaatttttttcattttttgtagagacggggtctcactgcattgcccaggctggtcttgaattcctagcttcaagcaatcctctcaccttggcctcccaaaagtgttgggattacaagtgtgagccaccgaacatggcttgtttctccttttgttaattgctgtagacacgagtttgatttttaaattttcccttgtatattcatagaaggtatgaggacagggtaccataagaaactgatgacggtggtccgatgagcactcgctacttgccttcctcctgtgatgtttgttgtttcatacaaagtgtctgttaatctggtatgttttaaaatatatatatatatattttttttttttttgagatggagttttgtttttgttgcccaagctggaatgcaatgacgcgatctcagctcactgcaacccctgcctcctgggttcaagctattctcctgcctcagcctcccgagcagctgggattataggtgcgcaccagcacacctgcctaattttttgtatttttagtagaaatgggatttcaccatgttagctaggctggtctcggactcctgacctcaggtgatccacccgcctcagcctcccaaagtgctgggattacagccgtgagccaccgtgcccagcctaaaatatattttaaagaaataagttacatttcagaatgagaatggatgggtcctactgaccatcctcatcttggatttgaagaatgtagagaatctttaatgtggtggcttttccctttttttttttcttttaaacatttttgaatcttagattactatcaagttccaagggagagaggacagtttccaggacaggtgaatgagccaccagccattttttcatgccagtgtgaaatgttgagtaagggaagaaggggtggcagctggggggctaacatttactgagcagcaagcaaataccaggtgctttgcatttcttttaacacaccaccttaagaggcaggtgctctcatgcccctttgacaaaggaggaaacagcctcacaggttaggtagctgatactgtgaggcatgcggctaataaaaagccagtgccttttccacaccaagatgcttatcattaggggccctttcctcctctgttagatttttttttagatagttgtgctattacttgacttgcctatagaatgtgagtttaattctattataccataagaattgagtgtggaagaatagtatgttaacttctcaggcacatgtgagttaccaacataaaatgtgtgtaaaatataaaactcatacgaaatgtacttctaatgagtcagacttctcaattttattgttatgtatggaatgactgccagtgggtaaacctgacaatctagtccttgtacaatatgcaaatggctagtgtgttatctgggagggttttagtttttcatgacttatcacagggtgacattcctttagcaaatgtctttaagaccaagatctggttctctgttttacaaggctcagaaaccaatgttaccaggagaatactgagagctagatgacccatctcagatgaagactcatggaccacactggttggcaccgcagtgctctacctgcaggctgacctctgtagggagaggccagtctgtgaggggggcatcagaacatggggtggttaaataattggaaggtttgtggcatccgactaggctagccggaaacctgcatctccacagtaggaatcccattctggttgtgcagtcatctctgatattcattggcctggattccctaccctgttgtcatctttgtcttgcagcacctctgagatttttccctggctgatcagcccctcgtttgactgatacagtttttcctgagccatctgagtatatctggtctgacgataggtactgcctatttaggagttggccttgctctttaaggtaactttgcatgtatctgctgaacaggaatacttgtttttcatgagactctaaagctcctttctccagaacgcatgtttagctatgtgtgttcgtaatattaaagagcaaaataaaacactcagaggctatgctcagtttttatgatgatacggaaacattcttcttagtgtttcttcgatggtttgagtgtattgttgttcccagtgaacagtgaagacttgatttgtttaatttttactcttctaatgcttcttattcatgagcacttataacccaatccaaagtctgtcaagtggagaacgcacaaccctggctttctggattcgccgagaacacttccaaatgcacctttagctgctgcacctgacgagtgtcatgccccactgtccccacatcctctcctgaccagctgagtggattacactttagagcttcggccctggtggatccagcttctaaccccaggctccggcctctgcctgatactgcgtgcaccccagccacaaccttggcctgccccctgcccttcagccccggctctcactttctctccctctttttttgattactactccctttccttcctcttcaggacaaataagcagtagaggaagttactgtcttttgttgttttattaggaactgactataattctaaaagacactccattttcaagtccaaatggctcaacccattctctactggagtagtttgtttaacaaaaattattatttgcaaatagttatttttatagatatgaaagtaaggaagtagtgtttaagttaaaagagtattaaagcagcattttatcatatttggggaaattcacctctccacgtccctatctaacccatacataactgtgctagtcaaagtcatgaagaatataagttaaaagaagttcaaagtaatgaaaacttgaaggaaaatctgagagacaaatgaaaaatgctttcaaatgtgatactactgaagatagtaaggtaaaattgcctctctttttttaagctgaaactactttggctctgggtattaactggttctgtaccataatcgggatatatcattccatatgtgtatgcctgtgaattcgttaatataaatgatgatgatattgtggtttatacttttattttaaattaaaaaaccgtctctaattgatgaaaggtgcctttatggtacagttactttcaaatacatcaagcactgcttgggttgacccttgacttcatgggcatgttggtctttgacccagaactggtaaatgaaccctgcagggaaatcattagagaattggaacaattgtggtagtgggatcaggggtcaaaccattacctacccatagaaacttccgtttcagttggacttcttgcttttctgagagcaggtcatattttcagggagaataccaaagaagaatttagcgtacattagtgctgacctatcaggagaaataagaccgtaaggatttggatgatggctggtttatattctctaatgccatgacaaatgactatgctgtcattgtgtagaagtccattttttaatgtaagtattgtggaggtgtaacataaatacagggacatgcacaaatttaaatgtacaacttgatacattttctcaaaatgaacacacttgtgtaatcagtacttggttcagaaacaccaccaggaccccaaaagccctcttatgcctcttttgaatcattatccatccatccccaacccctaccacactgtctgaataaaagtcagttaaatttccagtccccgatggtcactaatggtaagccatttgtttagtctccccacagaaaacaatcttatttcttcacatgaaaatgtgagagggtttgtgtgaagaaaacacaaaacttattcaaggagtttctgtcaatatcagtttttactgtttcatatagtaactaaaagaaattttagacaagatggatgtcatggaagagaatattctttgctttcaaaatcagttactcaagagttaccctttaaaaattacagaaaggaagaaaaggtgtagttcaattcttttccattttggttttactattcttccttctgtaataactgttttctgaggactgtatataatctcagaattttaaatggtctcctgacaattaaatataaaatataatgcacaattagttttaaagtatcttccattaaatatataaatatctcaatgaagaaagttttaattttaatgacatttttgggccaaaacactgtcttgcttgtatgatgatattatagcctttaacggatagcttatgtctgagttcatggtggtcttttgttccaaagaatagaatcatttagtcccttcgttaggatactgggagtggtgttttgccattttctgttccagtggaagatctgggaggtaattattgcagtgggagagatttcattttccatcaaagcaaaaataatacttgttttgctaggagaggaaggagatgcacttgaattattaaatgattttaatttcagaaaaaccgtgaacctcctggaaaacactgatagagtacagttttttaaaatttctttctctggcttgtttttttttcctttggtgtgggagtagaaaggagaaaaacatgtattagaggagtggactttagaacactgaaaatgggctttgaagacagagagctggattgaaatcatggcccaaccacctcaccctctgaatctgtttcctgtgtatgaaatgcagttgtctctacttactgagtgggctgtcaggataaaaaaaacaagaagtgctatcatttattctcactgtttgccaagcagattccaagactttcttctgtctcattataaacaaagattttagcagtatttgtactagtttgtcaatgaagaaattgaggtctcagagctaagtcaagtgtttaaggctgaatggctagtaaccagtagaagtaaggagtgaaccaagttcgagtcacaaagcccatgctcctaaccacgaagctttgctcgtttttctgggaagtacaggccatctactggtgccaggcagggtcactgtgacagtgcatccagggttaatttcctgagaacaaatggggtttgaaactggcctggtgctaagacagagtctccctgctcccctcattcctgagaatggggtacagtttccttccacagaggaaccgtggttttacggggctgcatcttgcccatagggccactttttttttgcttctcgcgaaggttcctcctgctcaaatgtgcatgtatagagagtttcctatatcatttagcttagcagtgataggttaagattttcaataatatttattatttgctggatctgcccgacactttgtctgctttccttgcatttttccgcatgtgtggtcattgacctatttgtttattcacacagaaagtattataatatgcactcgttctgcgtactgtgcagtgcctgtgtttttctgtcttctgctctctttccccattttcgtcttgtcccttttttccgccttttcttcctgtatcctgccatatgtaattgcagagtgtacatggtcagcttctccataggtggagttaattccacagtcaacaattctcaggaatttaaattcagcttgtgccataccccatatgtttaagacctaaaacaatcgtaggtacttcagaactcctaactttataaaataaactatttatcacttcatatggcaccagggatccattgtaagttgagaactgtgctagatcacagatggtttacttcatggactgtgatttcacaaaacattctgtcttcacaatttggttctcttatctttcactcgtgtgaattccatgggaaatcagcagacagaacaaaaatccgttgccttatcaattcgagcaaaattattagcactcatgataaaatacattttacttattgctctttaaattccctctgaacttaattatgaatttttgtgttgtattagaggtgggcctcctgcacaggtcaggtaggcacattatgaagacattctcttctgcctgtgttggtgagaggtagctgtcttcagctgaatctgatgatggtctcttgttttatggacctgtgcacaatacaggctgttggggatcacccacaagaagatacactaaatattattatgtttgcaagtccaagcaattggagaactggagaaaacattctgtgagacccaccgaagggtagaaattagaaaacaagagatctattttaagtcaccaaaggatctatcaaagtatatcctgctcttatgcatactgtgacatttctgctgcatagttttgcattttactcttccttttatcacttacaaagttatatttttactaaatgaaaagattttgagatcatcatatgcttacatagtgtgaaatacctgttagagaatgcatttaactagagacatacaccctctcacacacgtgcgtacacagatgcatacaaacacatcctctgctctcttggatgcagctatcaatatctgcgctgatgttgttaatgaatatatctagaagctgcatcctaatgtagtctgtgtttgtagaacctgtgcatagttttgatatgaatcacttagcttctccggacctctgtttcacatttcgaaaacacagaataggagtaaatgtctactgtggtcttgtttcagttctgaaaattctgtgcagttcctaacaaccaggcagtcataagggtttctcttctgagtgaaatgtagcgtccccctacattttaatgtttaacttgtatcacgtttttatctgaactactgtggttatttttttttctttttctatactcaaatgtgaggccccttaacatctgctaaactgctctaagaattgatgatgtctagtttggctaagaagagcataggttagctgtcacaagtctaaatatagctccatttattttttatatattattcatgtcctgcatgtgtcaggtatgggaaccttgcatttactatttattgctgttgtcagaatattcagtagcaagttcctgaggactgtttatggcctctcattgtcaactgtgggctacctggttataaagccattaatctaataaaatttaatatgatgtttgcaacgtattgcaaatttaacactactaatttcttgtaggtaggctacagttaatgcagttacttagctgcttcagaaatgttctctggcaaaacccacttttcctcaccaatgtaaagtgaggcctctctcagttttttgccactcttgaacatttaaattccctttgcttcagcatttattcatgttccttgtaccagtaatgttatgttattcaaggtcaatcctgtttgaatactcagatcatagaccaattgccagtgcctaaagcaaacctggagcctttttcctgtgaagaatcagtatcagcttgacactaatgatcatgagtggtaggtaatgagaggttgcaagctagtggaaaggaatcccgcaaacatacctttctttgtaacataacagtacttaacagttcagcttctaggactgactaggtaactacatgaagcggcattccagcgtcctagcctatacgaataacgtttctccttggaaattgtagttgttctcttaaaaggcatgatgtaattcatttttcctgatagaggatagccagtaggtcagttgatatcatatctgtttttgcatacatattatgcttaaagatatgttgttgcctatacctaagaaaaaagactagaaggaaatatggcaaaatgttacaatttagtaagctctgaatagtgacactactgatcattttttttctattttgttttccaatgtgtttctcttattttttaaagaataataagctgtgttaccttaaattgttcattttgtttttttcttttttttttaaagaaagataaaatatatttctcttattgctaataaatatattttttggttagtagtacatgaaatcaggtcttcagatcttttctcctttgaataaaaatctatattggaattattgtaagttttgatattctaaattgctaaatatcaacatctcttcctattgctagtatactgacacctccttttttgttactagttaaaaatcttcaataaaagttaacactaaatgtcacttcataattacagtaatgatcacacagctgtgctttgctcagtttataacatatgtcagcatcagtttaggagctcagcatcgtttcctgcccagatataattcttcagacaattcttgtggtcagtgctaagggtagtcaatcaggccaggagttcaggtatgaagttctggagcatgcggcagtatcccttgccctttgcaggtctcctggcctttatgtgtttatttacttacttattttcttagttttcaagtattttacattgctagattaggaacagttttatttacgagcatgtgaatttttgaggaggaactcttacacttaaatgaacctgtaagaagcccatagaaaagcaaatgcctgcagcgctaataatgagaactgacaaggcaatcctgctgggtttatttatgaccttctgcctttgttagctcttgtgagaaattcctttctaaccataacaatattgttggagtttggcactgtacagagaaatcctgccgagccctggggcccacaaactggcactcgtgcagctcggagcagattgctgtgctcctcttagctttacatttttttccttcactcttcttttatttaatttctaagtaacatttaccagtcttcgtatgtttatttttaaagatgctgcttttattctcaaagccaaaattcattttatccttagtacaatgtcttatctacttagcagtgttgagaaaaattcagaagaggacaggatgcagaaggcaagaagaggcaggtgcactccacacaagggcacaccttggaaggtcccatcacactctgcagactgatggactgccgtggtgctcctaaacaatctcacgtggtgacacatcctaagagcaaaaagtgagctcagtaggacaaatggactgcaggttatagttttaggatactctttcctctccatttcattactttaagacttctacaatttccaaatgaaacaggaactttaaaagcatcagttcacaaataattgtcttaaaaattataattatctttgaaaggaaaaaaaatacaacaacaaaacaaacaaacattaagcatgtaactcttagaaggagaccattgacaagattgttgaggagttattccgggcacaggcgctacctgtacctgaagcagtggtattcattgtttcctgataattggtcctattccacaaagttgccagcagtgaaagaataacaatttattttaaagtctgtgtaaattattgataggcatgtgacttctgtttcttctgagaatcttcaggttcaagatgccagcttctgtgacccatttaactagaagttcctatgtctgaatttatttgttcgtcttttggggaaggttgggttgttagactggggctgttattatcaaaaggccatgctatgaaaatctgactttagacttttgctttttcccacttacccaaaatcggatttttcagaagttttcctcagctatcttattcaggtatttacagacttgctaaatggggaccataaagaaaatcttagtaaaaatattaggttgatcaaatgtgcaaagtatgcatatgagcagaattttttctttgtccaacttgatcttatcatttccttattgtatatgtcttcattaagttttaacatctattctgaaaatactaatgtgatttcatgctactgctattcatctgtttcccatcttttaaataggatttgttgttcaccttcgagtgggcataagttaatcttctcttcattcagttgtgctgtagctatgtgttaaaatctccagggtccccttttgttttatttcctttacaaaaaaagcttcagcatttatacagttggtaaattctcaagtacaaagaaggaagtgaaaatcctcccaaatctgatcacctcaaataactactgttaatattttattcagcaccagtctatacctgttaggcatttaaaaaggcacgtatatacaagtgtattttgtatgtataaataagcctgcatgctcatataatctttataatgtttattttctgttgttacttgattttcgttcaatcttttcaataaaattgtactgtttatattaatatgacatacatttttaataatttctatatacttttaaattgctcgctactaaacagatttagatgatttctaacttattgctgttacaatgtccagttttcttatttcctgttttaaattatcttaatactatgtgatattataaaacaaaaatcaaaataatcactaacatatattaagtggattctttattaactcattcagttctctcagcctctttgagacagagatccattttataggtgaagaaactgaggcttagagatgttaaatcacttgcccaatgtcacaccactgggaagtactacagcaaagacttgaaccaaggctttacaacctgggctggttcccttctctagtcagtgctgtctttggtgtgtagtgtttatatactttaaagaagtgccaaaggccatttgcttagtataatattgattgttaatataactctttgcctaatacataattatctgataaatatttgataaagaatgggatacatttatgccactagtatttattcaccccatctttttttttttttttttggagacacagcctcactctgtcgctctggctggagtgcagtggtacaatctcggctcactgcaacctccgcctcctgggttcagggaattctcctgccccagcctcctgaatagctggaattacagatgtacaccacaacacctgcctaaatttttgtagttttagtagagacagggtttcaccgtgttggccaggctggcctcaaactcctgacctcaggtgatctgcctgcctcagcctcccaaagtgctaggattacagatgtgagccaccgcgcctggccctatgcaccccatcttttaagtgagatatttttctacaagtcatttacacattctttactcaaaatgtattttaccttataagcagtgtttaaaaacagtatgtgtcagaactgtgttaatatgtggatgtatgtatttatacatagcgactgcttattgagcacttattgtatgcttaatgtttcagattcacgattgcatttaattctcactgtggcataaatgttattttctctatttggggggtggtgaaattaagtattctcagtgaacttaggtaacttgcttaaggttaggtgaagaaatgattgcaccaggacctgagtttacactgctcttaccccacaattcctgctggaggagttagctgccatgttattattcaacacctttatcacagtaagtatttaacgagcacagatcttggtgccagacagatcatgcttagtgctgctttatctacagcaactcagttaactctctcaacactgtgagttcattatttattatccacatgctacacacacaagtggagtggaggccggtagggtttgactgtggctcaggcctttgcccaagtcctccgagtgagtgaaactgaccagcagctgtctggttccagagcccgaattctattgtaatcatccccatcccccaaaacaaaaagaagactgttatgataccatacaaatatcaaaaagaaaacttgaacattgattgcatgcctttgagaagcaggtttcattagaggattagaataagatgtagcaagaaggcttcacagcaccttccagagattttcagattgttttttgtttgtttgtttgttggtttgtttgagacagagtctcactctgtcacccaggctggaactaagtggtgcacactctcagctcactgcaacctcagcctccggggttcaagcaattctcgtgcctcagcctcctgagtagctgggattacaggtgtgcctcaccacacggggctaatttttatttttagtagagatggggtttcaccatgttggccaggctgatctcgaactcccgagctcagatgatccgcccacctcggcctcccaaagtgctaggattacaggcatgagacaccatgcccggccaatttacagattattgatcagagtttaagtccagctttacttgtttggatatataatttacttggataaagaggaattaggcaatatgatgggctagtgagtcaagttcttttggtctctcccttgttcaaaggtattacagtgcaaaggaaatgtgaattttattcttgtgcctttgggagtcccatgtcttattttatgctgtctttgagactctttatagtggagtgaagtgatcatcagaggaaactttttatcctactctagggtctgggaacgtgctccagggaacagggtaattatttataaaggtgaggtatagtaacatcatggcgtggtgtaagaatggctcttgtggagaggtagtatggttgagtgtaaaacacactgggtgtccagtgctcattcaagtccttattgatactattttctttatcatcatggttattattattggcattggaagtttctttctgagaccctgaataggttgatgaccacctccttttgagtagtttttgaagtaacatattataaagtggttatatgctcttggaaaaaattattatgtaaaattgcacttgagtgctagcacttgaggtattaagtgaccagctgcccctgtacaaaaatgaaaaacaactcattttggaaacctcttatctaagtgagtctatgaatcataacagaaaataagaaaaatgcatggttttaagtttgacttttgcgggagtactgcatttgttgaatttgattttaaaatataaaaatagtctccataaaacatttccatctgtaatctagttaagctaatcatgtaaaaagtttctgaattctctacttttctaaagcattcagaagtcttaaaaatgattttaatgaaaatatgaaaattttctactaggatacttgcataatttcatatatatcacccaaaatgtttattcttgtctggtttttacatacatccacaaaatttttgatattcttttactaggaggtggagcttaattcccctcccatgagtgtgggctggacttagtgactcccttcatgagtagagtatggacagggaataaagtaacttaacaatggagaaacctggttgacaccaccttaaccaagtgatcaaggctaacatcaccagtggtgagtcatgttgacatcgtcatgttgacctcgtcctccccgctatggtacgatatgaaggacacttcacttctgtggtattttcccccaaaatctgtaagcccagtctcatcatgagaaaacaccaagacatgcaaatgaaggacattttacaaaatacctgacaagtactcttcaactgtgtcaaggaaagactgggaaactgtcacagaatggaggaggctaaggagacacggcgagtcattgtaacatggatggtgggttgggtcctggaacagaaaagggacataagtggcaaagctggaaaaatatgaatgaagtctctggttaacagtgtcgtagtactgttcattttgcagttttgataaatgtgccatgttatgtgaaatgttgctgttagggaaaccggatgaaggatgtaaaggaactctcagtctgaagtcatttcaaaattgaaagttaaaaagttcagtgaaggatgaagaacaaatacattttttcttatggttcatgtgaatgggtagaatatcaaaataaccaagtttagtaatgttctacaagtaaaacttgcctatttttcatagtagactccacacaatttgtgagttgtgtgtttttctgttaggtttttttgtttgtttgttttgtttttttttcctccaggagatgaggtctcactgtgttgcccaggctggaatgcagaggctattcacaggtacaatagtgtcctacagccttgaactcctgggatcaagcaatattcctgcctaatttttttaaagttgctaatttatttacagttcctataaatcttaatgtttataagcattttactgctatactactgaagaaatgaatgtctccagaaggctcatgcctttttattgtgttatttttagagattctgtgtgctaagcattgtacttctaagataaacagtaaagttgttgtgggtttttttttaccatgagagatggaagtggtggtattgatggcttttctgtcctgaagatttattgtaaactttcagttataaaaacaggaatctgtaggcaaagtctgaatcttatatatttacaggtcttgttagtttgtcaatttactttcaaaagcacatgggtcattaatatttataggttcctacctggcaatgatgtttgggaagcaccaacccataaacccatctctctctcttcctcagtggtattaggtgattttttcctttctaactaaataccttgagagtcatcaccagcagttttggagtagaatatagaattaagagactataatctttaagactgtatgttagtcatagtttttagatactgtcaggctgttttaaggttaaggcatatatctttcaactcatgtttttcattgattctcacatggacctgaaatgagtcagatgactatgtcgatccttaaaattattgcaatctagaaaacatgttgctatttaacccagactagagttactcaggcaattttgttgtcattgtgttatttgtttaattctatataatgctaaaaatatacagattttttaaaaagcactttacagatttattcttaaatagtacctgcaattttaattgtgtttaaagtgttcttagtctcttcgttggcacctattgcaaatttttcctcttctaataatattaagactcactttctggacctctgtggctccctggttcctaaaaatgtaggcccctgttccttggcataagcacgtgaggccatgcgcagcctgcctctgccaggctccggagcctcaccctctctcctgggcatcccaagtgccgcctgtgccgaaatgagcatgccctcccctcactcttcctgccctttgtgcctttgtggattgtcccctctgcttcctgtctctttccctgccaagtgccccttcccaccagctgtcctagagtatcctttactcctggtttggaccccagtccctggacatttacccgtcagtctgtcctcttagcacttactaattcaccctccatcatagaattttctgcacttcattgttgtttgtgtggtttgtctctcttcattgagactcaatgatagaaggacattcaagtgtacaagtccacatatgaatataaaatgtcatccacacgtcaacactgccttctccctttttctccacctcctctcacccatcccacagcaccaactacaaaacttagatagggcttgcttaagggtgactctagtacaaaaatacctttcctcacattattcagtatctcacttttttataaagctttaatttcatcagtacactataatttgttttcaaaacatcattgttcctggaataataaagggccagcagttacgcacacgagtctttttcgtgttttagcactgacatggggcttgacttgtgggtaggaagagtcttaagttcgttggacttaagtatgataaaatcagataaaaagcattttaactggtaggaacaatgaaatgccgctaacaagatgctgttattttctcacgtaagaaaatatgcatagtatctggagcacttagacggcccttgatcagtggtggtatcagttgttgctaaagtcagcattctcgtggccataatcatgagcatttctgaggctggtcctgggagtctaaccaagaagggaaacgttacttccagatgaaggtaaatcccagattctatatacccaaaaaaagcttataaatacattttcgtaccaaattatttttgagttctactgcccatactatgttgagaggtctatttgttgttctttctagtctacgtaactcctgagactgttaatagttgaagagtggagaatctcttcaaaagagcttgaaaactgagactattttaggaaccccttgaggcttgtgcagtggggaagaaagatcccttttatgatgcatatttcatacttgcattgtttaccacttctaagtttaggatggcaacatgttccatatcaggagttttaacccaaggacctttgagaacagcttttattttagatgctgatttttaaataccaaagaaaatgtaaccattacaatgatatttatctaaaatggtatgcctaactcagaattttgcttttgtaaagtgtcaatttagctgattatcctacaaatgtcccccttaaaatgagagttacccataatggaatctttgcctgagaaataacacaaacgtatcaggtgaaagtcatgtcacccaaaagtagttcttggccacccctcttaaagtgaattttggctcattagtttttcttgtgttatctctggcttttgatacggatttttggagcttagaactaattttaaattaacatcaacctttttttccagctgacctcgtacatcttaagggtgtgtactgtacatactgtcacataatgagaaaataaatacatatttggacatgattaaataaaaagcgacacatgtataacttggaaagaggatgctcttaaggcctaacaattagtgcttggcagattttttttccagggattctgtttttctggtgcctttgctttattttttaatgtggtctaagataggaagtctgagcttttaactcatttgctgtctagacaaatgaaagcagcagggactttggtaggtatctggacataaacactattacaacacaggttaatgcaagaaaaagcctttaaacatcatggaaattaaacagtcactgtgagaattttccttttgtgtgtatgtgtctgtcaatttattgactcaattctcatatcaatttcaaggtgtattcatatcacgtgaccaaaaatgatagttgtgaaataagggtggaagatgtgaagtaattttacagtgtgtttctaaagaaccaagaatctaatgacactggatacttgacatccaggatgttaattagaaacagagggctgataattcattgctaagttttaatagctaagtcaatagttttcagtagagcatttatggtaaatatttagaaatatttgcatgtgctggattactttctatagtgtttgcagctgtatttttctgtagagcttataaatttagtgatatttaccgatgaacaatcatatccattttgtctttagcaccgcacttggcacaagaagtcactacccttaagaaggtgagggtgtagttgaagagagaaaaagaaaaagaaaaagtacacggttttatttcattttaatattctaaaaaggagaagagacactacttctgctttttaagataattaagagactttttttgaagaccactgaactggcgttttaacctgtgctttaaacccatgggaagtcacagtgagaaatcattaactgtatcctattaaaatccttaaacaagagacctgaactggtctcattgattgaaatatcttctctatttctgattcagtgtttatcctcatgctctcctggggcacttctgagcaagagatgcccaaatgtgtgcagtgcttggcagctttctatgagcggctgatctaataccatcagctaattgtattgagaaccatagcttagagtattttcatttgctttttaaaaaacccacttatttaattaagcaagggagtaaaattttctgacttattcccagttctctgagaaagtaaagccaccagtattgactgaatttatcctttggtgagctaacttacgctaaattgaataccatcaaaaccaaatatgtcttttgatgtgtagcaagtcgtcatgtagtaatgtaaaatatttttaggaaggatcatgtacaatctgtaggcatgagagagtctttatacttaatatctatttcaattatctgcagattttaaaaaatccttcccatgcatcttctttgtgggatgtcccatctttattccttctgacgctgccctccctgagcctgccccaacatagagaatctgaacatattcatgctgcatgttaatttgtgaatgtttctcttgtcaaagtctgataagattgttattgctttgggtggcatttcattctaagcacagtgaaatctcttgtacttgtcactagggttagaatgaaaattttacatgggcagagagacagtggaaggatgatggttacagagggagagtcattgcagggaactgtcatttaaattaagttttaaagctaaacagcttcatgattttggtttttgaaggcagggattttaaaaaattaatcatcgatagtagaagttaagttatttttggtgtgccagaaagtaatcagtattccgagtgatgtcagttactgaaaacccaacttaatagcaagatttcaccaaatcacatgatgatagcaaaatagtgattttactatgcttgagagcccatgaagtcattgccttgccaatcaccccatcacaaaaagaggactgatttatggaatgccatggggcaggaggactctcctagccccttaaaagagactgcctgcaattacctcacctgccagctttccagcaagataaatggaagcactgtagcttgaaggtgccttgggtagaatgagatgcagtaaggtctctctgttctttacaggcatcatagatctgatagtacttataaaagaagaatagagttggtgccctgctgactaaattgtcctctagaggagtattagttacagagcttctttgttaactaggctgaatacttaaaccactgttgaacttcttttattagcatgttttaagatagctctacatacagataccctaacaatctgcagggcgggaatatttctgtataatttacatataaaagtcgcgtgagtgtgtaacagtaatataataattatatctttttattactcttctgttacactgaggtctagtcagcactgaaattctgatgacacatgaacacgaagaaagccactgtttttatatttttctcttgatacttccttgatcagcttgttgaataacagaaatgtttttgatgcctttgcaacctgagtaaagccctcttaatgcccatccgtgtcactttttaaaccataatatggaattttaagggagaatggggatgaaacttgtaggctgtgcagagaattacaagaacttcaaagtaaaatttcagattttatgatgagagatttgcataaaattatttaactacaatagatgatttttcaaaaattaaatctgatttgtcctttctacgtttaacttcatatatagtatgggattttatatcttgttatctaccaggtttttttttctttagagaaacatgaaaagcctatttcctgcctgatggctgttctctgactgccgcttgtttattggtcattgccgtgtggtgggtactgtcagggcctggatatggaggccatcacccatcctgggtttttatgatcccttcaaaaagagtaagattatatggagttgtcactcagtatttttcagggggatgtagtaacggagtaagttcctgttcctgttaaagcttgtaccagtcatgatgtatggtaaagttatggtgcatttcagctgaggcctgtcctaattcctgtttttcccccaaggaataggcaaaggcagtagggatggtgtgagtacacgtggttctttaaatcaggggtcagcaagctttttccgttaagggccagagagtaaatattttcaactttgcagcccctgtggtctctgtcaagacttctgttgttgagtccagtaatcaagttaaatataaagtttcaccagctgaatatgtacaaaaccatgcatctcacgtgcccttacatttctgctaatcataaggattagcataaatgtttatatacctttgaattctaacaatcggattgaatttacttaattttattttggattttttctggaactgcatctcaccgtgtcacctaggctggagtgcagtggctgctcacaggtacacttgtagctcactgtagccttgaactcctgggctcaagcactcctcctgcctcagcttcccgagtagctgggaccacaggctgtgccatcactccaggcttctgttttggagatttgatgaactttttctaggggtgctgtttgcagtctgctctgttgctgttctgttgtttcccataagcacagtcattggacattgaagattttgtggaatgaagacgttttctgttttacttagaaagatattcttcttagcagaagacattttgtttttctatagcatttctctttttgattaggttctgtcaggtatactttagaatatgatttttaaagagaagttaattatatgctataacagatgcttaccagataaactaaactatccagggtactaggatcctaatcctgagtttgctttgtgacgtttcaggaaaccctgaagagctataaccagctctgatttcccttgcttttttttgtactttctggtctaggtttactcttagaatcttagcattttcctctgccagattctaaagccctattctcagaagtcccagttgcaagcagtgaggtaaaatttaacattgataaaatttagagggtggagatctattaggattgaatatgctttgtaaacagtagcataaccagatatttctgactccattctatagtatgtagtcttcagttatcaggacaagtatcttttatgctgtaactcagccttgagaactcattggcacattgctcggtcagtgatctgggagtccagtcattgcaacggggatgcactgagcacctgctgatgggggcctccatgggagccatggggggcacaccagtgatgcaggctgaagtaaaggctttgtctgcgtcctcttctgctgagggagcagaagacagtttcttcttcctcctctctcatcttccccttttcgtctttagcacctacagtctgtcctcagtaacgtaaccttcaacagtaacttggactctctgagcttccattgttttgtatctgtatcaatggggtttttaatcactgcctcagagagtatggtgataaaatatagatggcattgacggtgaaaaactggtattaaaaagtaagatataacattaggacccatttctgccaacataacttcaaagacatttattttcacaatatcatatataaatacacacattattattttcttttaatggcactttattgtaagaatttctcggccaggcacagtggctcatgccagtaatcccagcactttgggaggctgcggcaggcagattgcctgaggtcaggagttcgagaccagcctggccaacatggtgaaaccccgtctctattaaaaatacaaaaattagccaggtgtggtggcaggtgcctgtaatcccagctactagggaggctgaggcaggagaatcgcttgaacccaggatgcagagcttgcagtgagccaagatcgcgccattacactccagcctgggcgacaagagtgagacttcatcaccccccccccaaaaaaaaaaaaactttctcatcacaaagtttggtcaaaattgtgactgctattacattacaatatcctagtttgaaattcacgtagtccaccaatgtcaaattctgaaaaaaaggactcaaagcctgtagttttttactttatgaagtaatcatttaagaaccagcattccattcctatggtaagtcaccaggcagagtgctgtctgtgttgtgtggcattttgaacaggtctaatggactcggtgctgacagctgaagggcaaactgtatggggatggttttatcaaagagaagtacaactttactcattttttaggagagaggcaagatcttattggttcaacttacaaatgacctcattaaaatctaataaaaagtggccatgcttttttattttgggtgttacccagaaaaccttcatctctgaaggggacgtcattatgattttcaagtcgtcttttgatgagatattcatccaaacgtgtcactctataaatacatcttttcctttcttaggatctgtctggctccattgatgacctccccacgggaacggaagcaactttgagctcagcagtcagtgcatccgggtccacgagcagccaaggggatcagagcaacccggcgcagtcgcctttctccccacatgcgtcccctcatctctccagcatcccggggggcccatctccctctcctgttggctctcctgtaggaagcaaccagtctcgatctggcccaatctctcctgcaagtatcccaggtatttactttcctgacaattattattttactttgtgataaagagagatttcatgttcatcaacagtaactcacattactttactatttaaaacctagtggccacatattaagagtataactgaattctcaccaaggcatacgagagtcccagttcctaaagatattcaacaggtgattataactacccctttaataaaatgaccaattactttgataatttcaatttgcatatttaccttaacttatgccagaaacagggtattatttatcctcttagcatatgttttgtaatgattctgttacatcagagcttctgttgatgagtgccactaaagtgagattgttgatgaggattggccttatttttttgtggttctattcaatacttgccacagcatttattttctaaaacatttctacggtctatacttatcagtgtctgatcacatgcaggcactggtcaaggtggagcatggtcgaggcgttcttactgatacaaactcgtgccttctcttggacacaaggagcccatgttctggttaactctgtgttcatttatttcacttgtcatgcatcgcctctatcttctccctttattatgttctcgaggttatttatttggttatttatttgtcagttacttcatcctcatccagctttcttatatcagacttcatccattcaagtctaccgtacaactagctttcctttatcaccaaaccagataattcattctatccttccaaaatcatgggcgttagttttggtgctttttaacgtttcacctcttttatattaaaaaaaaaaagtgtattgtggaatgtttagaatattacacatatatatctctaaataaaagaacatacatagcacactaattatgaaacatcaactatcaaataaacattcatgaattcaccatccggtttaagaattagagtatcataatgccattgtatctacctgtatatttcttccttatcccaagctctatacctcttcctcacttcaaatatccttttaatcttttttaaaatattgttcttttggtttttgggtttttttctaagaattttattacaaacattcatagagtatatattgttttattaagttcttagctttatggaaatgtattatatttggaatgactataatttatcatccaatatgagacacttttgtgcatgcaaagggctactattaacaattacagtaggatagcggcataagccagaaggtcttgggcaggtcagataatatggtcaacccacttgtagtgtaggctaaaatttgctttttttaactaaacgttacatttctaagattcatctgtaatttgatataggtatacgctcagtgcattttgattaaagcatttcgatgttatctttctttcaaagatatatgtttgtcctcatagtgtttgtaataacctggacttatctgctgcttttaactttttaatgctatgaatactctgtagtctagagtttttaagacagtttttggtgttgagatggtttgtgagatgtcacctacctaaatgttggaaagttatatgtaaaatattgcgttactcaaagagcttactctttcattctaaattgagtcaaaaggactttttctaaaaacctaaatgaaaactttcttgaggtataaagatataatggttttaaattttaaattcctgacatgagtagttaaccatctgaagactttccacatgtctgtccttccaaatggggatttctaaacttgtatattcattgtttggatttgatgcaatacagaagataaaacccaacagaaaagctcacttcgggcatgtgatcctgggtatcaggtgttacattatatagtattttacagaggaagtagctcagcaaatttaactggcctcagagtctgtggttcagttggtttgcacagggtaaaagctggtgagtgggttatacaccatcacaaaggatgcccattcttcgcagtgactgcagatgcgtgcggacggagagcacaaggatctcactatcatttctccctgctaactcctagaaagctttccactttcttggatacgttatttaaagtgtatagtttgttttttaaacttgtgtcagaaacacttaccaccatattgcttcactgtactattccaagtcagctcctctgtagccgacctctatatggtgcttggtaaagctattcaatgaaatttagtaccgggaggaaattaggcagcaaaagctccaccttttttttggtggcatattcttcaagtaaattcttaactgtctttgctaaatgcaaagctacatggggttagattatataaatatgacaaatagaacatttcttagtatattcgccatggagtaacctcttaaaaaatctgataaacaattttggcatttattcacctttctcccaagtggaattacaaacatttgaacttgatggactttcataattatctgatactagccatataaccttgaagaagcttctaagcctctctgtgcctcagtttctgcatctgtaaagatgataaccccacctcataggggaaatgcaaagattaaatgtgtcactgcacgtgagacaggtacatgcggagcactcagtgcttgttgattcttacgatgttacgttcaccattatggatattattcaaactgagactgtctgtgacaattactgttcagagttgtacagttgatttaggcagcaagtcttctggttcttaatccagtggtgtttttgtgcaattcagaagacatgtatgttgttcccagtaatgacttggtgtgtttgctgaggtagttcggtaggactgctagagctagccatgaaagcataatatattttcacagagttgagctcagttttcttctagaaaaaaaaaaaaagtccacgttcctcttggagtttgagcctgagaaggttaagaggaagaccggaaaacgagagagaatgactgtaccccagagattaacagaatttctactgttgtctctacacatgaaaattttagctgaacacttagcccctgcttctctcagatcataggcaaacatttatgctagaccgcctgcctgccacacagaaaagttaacaatagatgcagtataaaatcctggattattttccctctttttgcctgtgtggaggccacatcagctaactgtgagcagcacttcctgcccagtggtcactgccagggctgctgtaaacacttcaacaggtgctcattgcacagggtctgagtggtgaatgggagttgacatctacctgccctcttgtgggaaggggcaccattttctcattcatacagaggagccaggttaccctcagtaaccttgtcctagaccttgggggagtagtccatggcttgagtccaggtattacccatttctctttgttcccacagctaagccgagggccactcaaatgtcagtttttgataacagttcatccaacattttatatgcagctattttaatggaatttactcaaagctcatgacaggtttttgttggggaaaaaaaatgattgtcttctatttccatttccctccacctaggcaccctgtcctttcgaagtttttaaatcatttccctaagattcatatccttattctctgagaagtattaaatatattaagttatccagcgtgcattatgttatatatttgtgtgatcttggtcataggtaataaaaccacattttggagatgatcataaagttggtctttgctttttgttttatatttactttcacctaaatgcaaatacaccttcctttagagaataatgaggcccatctccctcctccttttcccatctctaatccttatatttaaatggtgtgtatctatacatcagatcccaagttcatatgcagtccaccttcatttggttctgagtctgccagtgaaccatacatgccatgtagagacgacatgctctcccaggcgtgatactcaaactgtcgagctatctgttaggaatttccctttatttttctatatgtagtcttttgttttctttctgtccccttccttcctcttactcccagcaccaacttgtgtttggcctctcttctctcctgttgcttcctgccatatctcatcacctcctctccatgtctcacagactggctctttcaatcattgtctctccaacaagtcattgtaaaatgtgcagctgttatgtagctgatagctgggatgaagtaaagccaaatgttgcaggggattcttcctgatgttgctttcctaggatttgttgaaaaaaaacaatcatttttctccatctctaccctggtaaatgtaattgacagctaatgagaagtatcacagaggtagataaacgaagcccagtaaagcatcccaaatggctgattctgtttcttgcctgttaaactgttcctccacccactgcagatttgccctcctatcttgctgcatcacaaacattgtgagtgtcatgggaaccactactgtgatacactggtacaacactgccccgccacatccctaactcagctgggcttttcctcctgcattctttggagaagcagaatggagattttttatgttaggtagccacatggattctctccctttgtttgcacattcctgggctccagctttgcagctctctatagttagaaggtaaagaattcaggcctgcttgttgactctaaacaagcatttgagaacagaaacacaaacgctgtactctccctccagtgccatcacaaattttcttgttttttacctattctctctcctcttcatactgatgtatttatatttagagacagaaatgaaatagctccatctttgtaattggcagtgtgtattcatatactatacatttaaattaagtagatgtaatgtcaggtacagttaattctgaaatgtgtgatattagacatgatgctgatattctagtaaatgatcccatcacgttgcacttacactgcttcttgggttatatcctagcgtttttcactttggcgttaggagggctgctgggttttggatgtgtattgaacaggtcttgggtcttacgctgggcctgattgcccctaatgcatggtggaagctgactcagcacggcatctgaatgcaccgctgttgccagaagattctgcggatgttaatttcacttgtcttgcctccagagccagccattccagtttactaacaaagcaaaaatgtaaataagccaaacttaaaaattttttattttattggccagaggcttttgtcagcttttcctccatgtgctgtaagcagcggcagtgtttaaatattgagaggagggagctcaccgtgggggtgaggaatggacaggcaggtgttaactgttcatagcctggctacttttgtttataaaactaagctcatctgttttattaatgaagatctaaggatagtaactgaaaattcctgaatagatttttccgcattcttttttaggcattaggcatttggtatttgtactaagtccagtgtaagtagagttaactcactttgatctggcagcagaaggccactgattataatagattagggtcaaaaacacaaaattaggtcttcacgctagcacataatgagtagctgtttgtttcatggctattgttcttcttgcttggtattaggtaagactaatcaaaggcaacatcatcttagctatcatagacagaaacaaaatagagttgcatcaaatatgaaagtagaaccctttttcttttcacatttcgtgcttcgctgtttgaggcgctcacctgccacctggcctctcggcagactacctgctggctggctgggcatgagggatgggtcagggtgccttcagagctgagactgtgaagccgggaggcacaggtcaggaggaatctcactcacattccaggagccaccttcactgctcccatctttttctactgatacctcccctccccttctccctctccagccagctgcgcttcaccctactccagtgatcacctctgcacgtgtgcctcctgcctggggtagccgcctcccgcctggggtagcctcttccaggagcccctccacagtgcacagcatgtggcacctgctaatgtgaactcatacccagtgaataacttcagtctctgtcctttgaaaaggatcacaggtgtgacgagcctgaagaaatcgcttggtcagagctcgtcctcctacgccacaaagcaccaattcctttatagtggagcctaattctctgcagctttatcatggccattcctagagggcgagagatgcatccagcataccaaccagccataatgaatctgtgcccctcaggaaaatctcagacaaaaagcatgagttctagaaagggtggcacgtattggattaaatatggaaaagaactgtttggcagcactggggtgtatttagagctcttctgtgtgagtgctcacccagtcccacccttcagcaagtgagagctaagtagatttctctaccagccgatatagctgcagatacaaacaagaagatattctggtcaaaaaactaattttcttgcttaatttgacattcaaacaagcagaatctggaaggatgctataatgggaaagagaaagatgaatctcagttaggagttagtcatagtccagagtgaacaggaaggattccagtgagaggaaatgatagctcctggtctaatttgtcaagattagtacctatcagatgaacaatggaggatgcaaaccaatgtctctctttcatttaacccatttctcctggagttttaggtctcttagggctcaagcccatcctaagtaaataaactttctactttttaatttggccttaataaaactcagggtaaaaagcatgagtttatttctatatgtaaatggttcttagccagtgtcgtttcgtgatgacattagcagtagaccctctaaaatggcatttcttgtactgacagaaattttttatttgaaagtctgcataatcatcttacctaataatcttatttttaaatatctatcgaatgttcctttttggcttcactggaggtggaaatcctgcaacagcttgttgcaaggaagatgcatgctgcttattggcaagccgaggaggaaaaaaaaaattaacacaaaatgccattgatatatccatgtttttaatctgtggcagcacagaaaaccaattcagcagttctacaaaccaaagagaacttaagccagtatttttttccctgacaaagtaaaatatttggatgttatacaaaactatttccattcccttccaaatgctgcttagcaatagttaagaaagcaaattgtatattttgtctttttgagagacggggttgcatctctgtatggcttagttattggtagcgtgatgtagaacctcccactttaagataacagctttaaaattcaggccaagatcctggttatggaaactcagcaagtccatgggtcatgaatattctcagcgctgtttctagaggacagattccccattgctgtctggtggccaaggcctttgcgtttgaagaactgcctcagtgttctgagctactcttctccttcagaggtcactccacaccccaagtcaggtattctgatgggtggggaatgagtattcttttcttcaaaagcacaaatcttttcaatctttcattccagcaaacttcaaattaagccttttctcctcttctttctcccacatttagaaataagaaaacaatagaaatttatcaaaatacaaattcccacttggttttgctcctctcttaattaaaaaaagttgggcaactcagtttaaattatcctgtcaatttccgttccctttctctattcttctgtgtatgaaaatacaagaaagcctgtgtcaccaaggcaatattatgtgcctttttcttgctctgcaatctcagcagtgactcatgtgttttcatggtgggtctaatggtccactcccacttctccattatttttttgcattgttctctggagaagcacttcagacacctcgttctgtttgttttcactcttgagctgagtaggctgtccctgctctgaacctctgctcagctgagtgtcactgcgtctggattctgcgtgtgctgcctctgtggaaatgctgttggcattgacccgctgccttctcccttcgctgagaatgaagattcagaatggaggggtacaaaagcttttatgaactaattttagcctagaagtaaaaagtttcaaaaatcacttgagtacattttggaaaatggtgggtaaatgaatagtacttagagtcaagatgctcctaaagttgatttcacaaacttctggtatatcaccatgtttcctaaaagagaataagtaacaattgtggaaggaacaaaaccattttatagagagtgttaggtttatttcccagtcttctgataaccctggagccaggattattatgatgtgttgattgattatagccgttaagactcttactaatcagtttcatcacttattctcaattcacacacttgcatctttgatttctcttccataacagggtgatatgggttgtcattgactaatgaagaacagaattggtttcggcatgagacaaacggaatgccttcactaatcctaaaatgcattaatctttcataatccacatctgcatgtttataaatgatataactaggaattgttaatgttgatattctcccttccaaacagaaagtgacatgggagtttgtacttgcaaactgcattaaatacataaagctgaatgccaagagtgtgaccttgctgaggatgccaaatatattacttcatttgatggttttagaaaagtagcatgttgcactttgagtgttggatataccaggagatatcctgtggaaagccaactatcctaattgttccgtttccttcctgccttattttatcattctattctgtcattaattcagcaaagcactgagtgtgtattatgctgcaggcgtagtaagtggggtaaaggcgctgaacataaactgcaaagggtcctgtcctcgtgaaacttaaagtctagtgggaaagacaggaaatacataaataactacatactttattgtcaggtagtcaaggaaaaaaatcaggttacttctttagatagcagtggctagttagggcaggtgtctctcttagaagctgatatttgaacaagagaagtgaaagaagggcaggggcaagccatgtgagcatctgggaaaggagatccaggcagagaacggagcaaactcaaaggccctgagttagtattgtgcttagtgtgctgggcggcgaacaccaggaaatcagtgtagccacagcatagtggtcacgggcaatggagcagaatgtgtgggcagttaggtgagagaggagctaacgactttgtaggttatgattatgatttaggaggtttttttattacttctttttgagaaggagtctcactctgtcttccaggctagagtacagtggcacgatctccactcactacaacctctacctcccaggttcaagcaattctcctacctcagcctcccgagtagctgggactataggcacatgtcaccacgcttggctaatttttatatttttagtagagatggggtttcgccatgttggccaggctggtctcgaactcctgacctctcgaaatctgcccatgttggcctcccaaagtgctaggattacaggcgtgagccaccgcgcctggccgatttaggagtttaagtgtgatgtgatccctctggaaggttgggaaggcaggaaatagcataatcctgtttaggttttaggaggctcactgtggctgctaagtggacagtatactgtaggggaaggtgggagcagagacatcggaggctcctgcagtaaccacgcggagtgttgatggccgcttggatgtgcacatagcgggagtagtggcagaaggagtttggccgaaggaattggtaaatgatggttctgtacagaagacagaggaacacgtttttgaaggggaatcgagagtttggttttaaacatactgtatttgaggttcctactgggcatcctaagggaggttttgaataggaggttggataagatctggactcaggcagtattttggtgggaaaaatgagtgtgtgaggctttagggttcaggatgaggtcccctgggcacccagcctgcctcagcatcacttggagggcttgtgattcagtagttgtggggtggagcccgagagtttgcatttccaataatttctagttctgctgaagctgctggtctgggaagtactggcctagggagtgagtgaaggtcagtgctcctcagcactcgccacacaacatgcctgggaaaggaccggtgctggcccagccctggagatgctgagctaatcggtctgacacggggtattccgtcagtactttcttaaagctctccaggtggttattatgcacagccaaggctgagaatcactgagagaagaattctgaggaaaccctggggtacccaaaaaggtagagactgtgaaaaagaaatgcaagaagaaatgtttctagaatatggaagagagcacccgtgtccaagacaacttagcacttccccagtgctccatgggcgtgcctgagaaggaggcctgtcttcccagttaggagcacatacatttctcacaggaaagttgagggatgattagctcatgtgttaagggcggcatagtgctgaggttttttcccctgatctttctagaactagatttggttcagttgaaagtaatgtcacagaaaaaattcttgtgcaaaaatactgttgtattctcaagtccagttcagttagcagcagacttcctcatttccacaattgttacctgaagttcatttcacatgaaatccaagaatcatgttattttaattctacttgaaaaaaggcaaaaaaaagtatcacattttaagagaagcgagcctcagtggatatatttttgctgcttgttcgtttttcatgtggcctcagtgccttttcttagaagccgacggaggaactagttgagaattccctgtctctataccactgaccatgactttgcgtcagatctttgtccctagagctgcattaaagaataatgtgatttatcctttctgcctggaacatccatcccactcttcatgcagcccagcaaactcctccttacccttcaagaccccgctaaaggatctttcccttcacgaagtccttgctgacccctgcagccccggagttcagctctccctcagggctgccccagctgcctgagcccctggcgggctgagagcctctttcttctttttgtccccagtgccaagaacagtgcctggcaagtagcgctattcagtaaacatgggccaaattaaagaactcacagttctcttagaaaaatgggaattcaaaaggagagagttctgaaattggtgacttataacctttctcctgtgggcttggagccatctttctgcctttgcatttcaccctccatgggatcattcttttcccctccctcctgaaagcgactccactgtgacagatacctttcacaagtgtgcttgccgaatatttagtccaatctgaaagaagtaatggagagtacttgaggtcgtgctcgagaaccttcctctccacattgccacagtcagaggctctgtggcctgcacagccctccttgtcccctggcactcagcatggagagcttagccgtgcccaggctggcactgcctctggcagagtttactcctgagctgcggggtccctgagggtgcccactgccacccgcctggacctcccagttctagcctcgtgctggagaggtctgctctccccccagcaacctcacaagcccagcactgttaaaaaggagtctggttattgattaatccgggtttcattgtgcaactctatatctcttgaaaaagcacttatttaaacacccaaatgtattaatatgtcatggtgtgaattgtgatagtgaagcaaggtaagcaggtgctggtttccttcaaatatacattgtgaagtgttgatttatcccccttagatcctggagatttcactcaggagcctggggttttttgtttgtttgttttttaagtttttcagaatagtaagtggttttagctgtctcgttctttacttttaaaagtatgagttttatgccaagggtttaaaaatcttaagttttatcatgaaaacaagctgtcattagttagtataatcacaaatgcaatgaaattttaaactctgtaagaaaaagcatattattttagtacataaattgacacttaattctatatctaaatggagaatttatagaaaccatgccacctatagtaccagtgttttatctgttggtctcaactttatacattctgtgttatttccctcaaattccaatatttaattcccaaaccctgtatttttccctccctcttctgacatccagacgcagcataaagatgcccattgattgaccacgtgtgccaccttttggtctggaaaacacggtccctcgtacctacagggcacagcaagcgctcacgtgctatattctcttttaggtgcaaaatgactccaagggagtgagcatccgcatgtggcacttctcatagccaaccacccatgtttacaggcagagttgtcacgaagcgttggaacccagaatgagaaatttgtgacaagagagggtggaggcgagtgaaactttgattaaaggaaagtgccttggctttaaaaaggcctgtctctatccggcagcacagagcagcgatcaagtggaagaaagggagcaggcaggcgcctcagctaatctttctcctgggggcccaggtggacaaattggcaaccctgttcacagctttttttcttctcccctttgtgtcataagaactgctaatcggatccatgctgctgcaactgtggttagttattagcagaataaaagcagatttcttcaaaagaacgggtgggggaaacgactatacaaaattgcaaggttgttagaatctaaaatgcacagcagtcgatttttccccttattctgaattagacgatgaatacaagtctttcatctgtcactatacccatttcttcagaggcagccaaatattaagcttctcaaacaaaaaaggaatcttagaaagaggaaaaatattgaggaggaataagaatgggtgagagaagggaaaaattaggttttgtttttattaatttgccctggtgagagaaatataaaccatccctctatttggtgttctccccgccgcctcttaccttacatcaaagcgaggattcgagagaatggagctggtggctgttcagcattttatgtctggtgttctgcctgaggaaagttcagaacctacctcttttcttacagatagcagagtgctatgaatccggacttcctgggggaaggccgggctagcgatgccatacccaaatgtggagaatagacctttccctccacaagtgggttttcacgtggcccagtagaccttggaattgtatgcctgagctttaaagctattgcaaagggtgtgttttgatgagaatgccagattttcagcatggtagttgatgtacttcaggacatcatggactttcacaggggatgcctcgcagatcctcaagattcccaaagttagaagtggttcctgctttcaaccaaatcacatttttggtcatactgcctatttactattcatgtcttcacatctgaagttaactaaagttgagaagctttccttaaagttccatcttttatttaatggctgttttatccacaaagacacagtttttattcacctccccagagtcggtcctgagtggagtggcaagtgcagtgggacccaggctgagctgtgccagccgccaccctgagagttgtgcctcagtcaaacccaaagcacattatattcccacacctttcaggccacttagcagtcatccagactaaaaatgtctcattttaatgcggagaatcctctgtatgtaaatgttttatgactccagtttattttttttattttttttgagacggagtctcgctctgtcacccaggctggggcgcagtggcatgatctcaggtcgctgcagcttccgcctctcaggtttaagcaattctcctgactcagcctcccaagtagcagggattacaggtgcccaccaccacacatttttgtagagacagggttttatcatgttggccaggctagtctcgaactcctgacctcaagcaatctgcctgccttggcttcctgaagtgctgggattacaagcgtgagccattgcgctgggccaactccagtttatctttaatcaaagctgtgctgacttaaatagttaagtctagaagtccgtgcatcaccatgtatcctctgacttaacttgtcctttgccttgccagagacttttcagtttctttgccccaagttctctgtgggaaggtatctccccaaaagggatctcatgggtattagtgatcagactattaaaccaacttgcaagggtctgtcttaccctcgcacctgtcacagagttatgaggaggacccatgcgaaaaacattgtgtagttttagtatgtttaattaataaaagaaaagttctggtttgaatctatgatagcaggctgggtgagtaacgttttataagttggtctttaagggcttttatgaggacataattcacatagaccacatcatactcacttctgttttctacctgttggctgatcgtcctttatagctaatctatcttcaagcctaggagtgaggtttagaaaaagacttggaacactcagaccacagtagggaggagagttgaaaagcttaatccggcaggtttttgacagtgtattagtttgtttagaataaaggtatatggccctgtgaacggtgcgtgggagctgtcttgttctctcaagttcgggaattggaagtatccttattcccttcatggctcgggagtatccaagtcagatagcctctgaagtgcccatttatctgtatttttaggacctaatgacacatgaatagtctgtaatattttggataaggatttaggaaagtctagccccgttttgaatgaactttcgagctgtatgacatgaaaaggtttatctctcaaagcaggggcttaactccttcaaggtgaggacaccaaattgctgtggttctgtgttctcagttgaaaggtagggaagaacattactttctggtttatactgctctaatctgagataggatttattcacaataaagaattgtgttgacagcctgttcaccaacatcttccccacccctctgccctgatacaggaccttttggtaaagggtgaggtgatcttattagagacagaggcacacacaccccatgctgaacaataggaagtgttataagttcacacccacgcacttcagataaactgttaaccggaaccactaagcggaagcctgagcagattctgtatttcagtagtttgcttggagcatatcgaagttggtgtcagccagcctgcttcttcattctgagaataagtgggatttttttccgttcttgaagcaagtgaaatagaaaacactgaacagaaggatgctatgtctaaataacttgtgggttttctaactcatctaaataaatgcctgagactaggacatttgttgaatgtatggattatcaaaaatgtatttttcatttacaccattaggtattatgcaggtttttaaagaaatgacccatgaaatccttgtgctgtgttgcagagctgtaccatcttaccatactctagcttcttactaactgagataagatgtacagtgatttccacagatgcggagtctaccatgcaaccaaccaatgctgtctcttaacaaaattatattgtcatttatcatggtggaaggaaagatcctgaccagttcttcatgttgcagaaattaaaggagcaactaaatacaacccatagtaagaagttatagtgtaattactagtgggtttggcagaatataagaaatgcatcctccagaagatcggtaaagtcagatggtggcaggtgagacccgtattctactttaaagatttgaaagagagccgatttccatgaggctgtactagaataaagcaacccagtgttttaattttggatgcagcagcagaattgcacagtcagtgggaagcacaagatgaacacgatcatagtagtaatgtatcagtatttggttgctacaatgtgttcttttaatttctcactaaagttaatgacaccaccaagaattcttgatgagtagaagaattaattcaattgctaattgctgaaaaccatgaactatgtattgattttgtagcaccatcccatgggagtaacttgatcatgatagagttatttgcaaagtgactggaagcattcctcatttcttctcagaattcaacaagaaccacaaccagtttaattcacacggacctaagaataggtctgtcttacccttgccactgtcacagagtttatgaagagggcccaagtacttgccactaaacacctcatgatctccatgtattgaggatgattggccaagaaaattatccaaatttccatggtttcacatgtcttttcacattaattataaaaagccaatcttcttgaattactaatcgaagaatataatttaggacattgccctctatatagtgagtactcttttttttttttaacctcatttggtacattcaagctatctctaatttacctgcgaacttgtaagacaaataaatgtatattctagacagtgctctctctttagctccttctttcttcacttttgcccagagtcagctaacgtaggaaaattggaaggatagaatggatctgaggcattaaaaccgaaatcaagtagtgtctgtcattcagactccagatttgctatcttgactaatcatgtcaatattccatctcagataactaaatccatcttaggttagttggctttttagctgtaatgatgtgaaaggaaggaataatttttctatggccactacaacttttgaaacatggaatttctgaatatttctatatctattagtattactaatactggagataatgcagtattatttgaaaaggggtgaatggtttgtttgccagaattggttgtggttcagagttagtgttcttgttctttttctatagttgtatactgtagtaatgtagaaaggaattatccccaaggaattttaacctcaataaaggattaatgtgggaatcctattcacctcatgtttattctctaccatcccaacacaaaagtagtagagtataatttacgcaattgcatctgatcagtagttgatctgatttgttggtttgtttctgatccgaaagagttggaaaaataaaactacaagtaatcatttatctaaacatttacctgctaaatgtacttaccatttaagtcttagacttttgcctgcattaagtgctaaggaacccagcgcattcttacatatagataggagagagcataaagcaacttctgttactgacatttatttatgaagccttcccctttaaatatggaagaatgtgagatttctatgtcagtgctgttgttattaaatactcatctgtattggctttttcagcaagtattcctcctgagtggttcttttttttttttttttttttttttttgagacggagtcttgctctgtcacccaggctggagtacagtggcgcaatctctgcctcccgggttcaagtgattctcctgcctcagcctcctgagtggctgagattacaggtgtacgccaccacgcctggctaatttttatgtacttttagtagagacggggtttcaccatattgaccaggctggcctcaaactcctgacctcgtgatccacccacctcagcctcccaaagtgctgggattacaggtgtgagccactgcacccggccttcctgaatgtttctttactcactcatattatcatttagaacagggatcacaaactacagcctaaggaccaaattcagacaaccacctgttttggcaaataaagttttatttatgctattttgttttcatattgtctgtggctacttttgaactacaacagctgaggtgagtagttggaacagaaaacatatggcctgtgaaacctaaaatgtttactatctggcagtttacagagaaagtttgtctaatcctcatctagaataataagataaaactacatgattacagatgagttacaaagatctaattatctattaatctgagcttggttcctggaatcattagccatacttttttttttcaacaaatacttattgaatggttactatatgcctggttcaagagatataatatagcggggaaccaaacagtctgaattttctgtctgtatggaatgtacattgtagtcagttgagacaatgaacggaattaaattaagaactatggaaagtgttaatactgtgtccagttgtaaaaaatcgtagaacgtggcacttgttagtactgactgccccaccatcttgttctatgaagtatgctgagctataatatattcatgtctcagtccatccactgtacattatacattactggatgtgtgctaatttaccaaaatacacatattagcctctttttcccaattgtgttatatactaaaatcccagagttatgttacttgaatatttaatttggtacttatcttgatttagttcttaaaagctatttttaattggataaaattctcccaaaacttctcctagtgtaagattctaaagaaaatattagcaaacagaatccaacagtacattaagaaaataatgtatcataagtggcatttattccagaaatgcaaagttggttcaatattaacaacttttttttttttttttttttttgagacagaggcttgctctgttgcccaggctggagggcagtaatgtgatctcggctcactgcaacgtccacttcccaggttcaagtgattctcccgcctcagcctcctgagtagctgggattacaggcacctgccaccatgcccggctaattttttgtatttttagtagagacagggtttcaccatgttggccaggctggtctcgaactcctgacctcgtgatccacccgccttggcctcccaaagtgctgggattataggcgtaagccaccacgcccggcctaacaactctgttattaatatataccataaacatacatctggtggggggaaatcctctctgtaacaaaactcaacacccagttatgataaaaacactcaaggaagtagcaatggagagatacaatctcaacatggtaaaatgtatatgctttagtttcacttatggactagggaagctctagaggcatttccactaagatcacaaatgaggcaaggatcatcactatcttcactactgttcagtaatgtactacagatattagccaatgtagttaggcaagagaactcaattaaaggcataaggatgagtgtaggagaaataaaactgtctatttacggatgatataatagtaagcctggaaaaccccggagaatcaatgacaaattagcagtggaagaattcatttaatgcggtagtgagacataaaattaacatacaaaaagcagtagtctttctatacacaaacaataaacagttaaaagacatataatggtgaagagaatcccatttacagtagcaacaaggaagactacgtgcttaggaataaacttaacataaaatatacaaaccctctaggtacctgaaagaaactaaagaagacttaagcaaatgaaagatgtctcttgttcttgggtgggatgaactcagcagtcatgagttctccttgactgattatttcagtccaattgctgtgaaaatattagtgagctattttatatggttggacaggttgatactaaagttcatatagaaaaacatgcaagaaaacttagaaaacactgaaaaagaaaaggtgaggagcactattcttactggacactaaaacatggtataaaaatactggaactgaaaatagtgtgtgctagccagtggaacagaagaggaagtccagagttagaccaaatacatgtgaacatgtattaaatgacaaagatgatatttcaagtcactgggctaagaatggatttttaaataaattgtgttggaatacttggggagccacgtgcaaagagattaagttagatccatcctcacatcaaataaactcaagggagatggaaaaaaaacatgtatgtactcgaagaaaactagggtgaattcctctttaaccttggtgtagagagaatagcttcctaactgtgactcagaatccagaggcaataaaaataaagactgataaatttgacaacattaaaaaaaatttccgctacaaaagacaccgtaagcaaaactaaaagacaactgacaaactaggagaagatattcacaatatataccacagacaaagggctaatatctctaatatatgaagaacccttaaaaattccagggcaaaggattaagaacgtaagcagaaaaataggagaaagacttgaacaaacaattcacaaggaaagatattaaaatggccctaaaatctgaaaaagtagtcaaactcattcagaatcagtaagactggtaattttttatttttaattttttttgagatggagtcttgctctgtcgcccaggctggagtgcagtggtgcaatctcggctcactgcaacctccgcctcccgggttcaagcgattctcctgcctcagcctccccagtagctgtggttacaggcacgcatcaccatacctggctaatttttgtatttttaatagagacggggtttcaccatgttggtcaggctggtcttgaactcctgacttcatgatccgcccgcctcagcctcccaaagtgctgggattacaggggtgaaccatcgtacctggccaagactggtaaaatttttttaaacagcaatacattctattagtgaggttatggagagacaggcctttcaaacattgcttgtagcaatgtaaattggtacaaagtttctagaaggaaatttggaattgtgtaacctttagacccaacaatcccacttcagggaattttccctgaacatagaccccagcaatacaaaaatacatccacaaaagactggaaactgtctaaatgcccatacacaggagagtgttgagtaaactatggagcactcacataaaggggtgctggggagcccaggacagtgtgtccaggacagcgtgaaaaaaaggaaagcccaaagggtgtgccacaaacttaccagcttaaaacaaggcacattcattatctctgttcccctggcagagagttcaggcacctcttagctgctcaggacttacaaggctgcagtcaagatgttgggcagcctgcatcctcatctggaggctcgactagggaacaatctacttccagtttcattcggattgtggcagcttcatctcctagcagttgctggagtgaggtcctgagattctggaggcctctcgttcttgccttagtctcagttcacatcagagaagcctatttcctagaaggcctgaaccctgttgaaatgtcaggcccatacaggatcatctctctccattttgattatttcagagtcagctgattagggagtttaattatatctgcaaaatcctttcacatttgccatctgacatagttgcaggagtgacagcccatcactttcttcacattctttggatagaattacaggttctgctcagtggagaggaggggattactcaccggtgttactcattggaggttactcgagggtgtgtctgccacagtgagtgaagagaaatagtctaataaataaaaaaccaagtgaggaagaagatggctcttctcacaatggaattccagtaactaaatgtggaagaaaaaggggaaatatagaatcaccgttagccgataccactgtaataaatgtaaacaagatcttctaaaggatccagaaattcgtgagtgcaggtttgaggaggcataggatttgcatagtctcaaatatcttccaaaaaatacttaaccaactacaatgggaaaatagattgtactgagaagggtatgacatttttgtggtacacttccccaaattcataacctcattttagggataaaaaatataatcagagcaaataaaatttggcaacattctacaaaataactgaacagtactgttcaaaggtgtcaaggtcacaaaatagaaggaaagactaaagtacctaccagctggaggaggctaagggaaagtcactaaatgaaatgtgggatgatcccagaaaaaagacatgacgcggaaaaatgggtgtaattcaaatgaggtctttaggtaagcttctcttctcggtaattgtattatggttatataagatgttaacattggaggaggtgggctaaaggatataagggaactccttgcactatttttacaagttttctgtaagtctaaaattaattaaaaataaaaatacgtttttaagaaaatgatagcatagacttaggctgataattttatttcagtaaaagtagaaatgcaggtgacagttctgcacctaaattgtgcacgtggctgtgtgtgttatcattggagaatacagaagtgtgcaatgatggaacttactctaattcatagtatagtgttttccagttgtatttttttccattatgcttacatcataatagacattgctgaggaaagaacacgggggctctctttatttatttttttaagctattttaatgttaaagtgccttcataaagtgggttggttcactgtgcccagcagtatgcgctttaaaaattattaccacactttgtttaagaggttttacttgtgaccaacacatgtcatataaaaatctgtaattttgaaggtgtttattgaattcggttggttcggagggctctgaattttcttctttacatgggccaaggacacaaatgagtcttctgttatcactttctcaaatgcattttctgagtcatcatctgctgtgacgatgtttaaactatgcctgtggaagatcaagttgtttcttagttactgtagttactgaatcatagtaactatgacttagtagttatgaaactatggtagaaagatagggagtaaaggaaaatgaataagatggtttgggtggatctgtatcatgataaagctcttgtatctttaacagaatgaatttggtatgtgaatattctcattgctttaaagagacatctgtcttagaattgtgccacacaaccagaagtgctgcttggctgtggcggtattttatgaatcatgggatgcattacttacagccttttttatttctacttgaaatattgtgcataagagcagtgcctcgggcgtgcactgtctaagccacggtgccctgtgttcacatagaattactgtttgtttttactgtcatgagtctatgaatccagcctgtcatgcagaagtgatcctgataatgtaagcacttactgtcttgctgcagctgattccccagtgacattttaaaaagtcagtatttggctgcagagtgctttaaatttctaaatggactatagattggaggccttagggtatttcataggaagcacatgaccctgcagtgagcacacagcaacttttgtagatctgtagccaagtcggtgaccagtatttacccttgaaattgttttggttcagaatgttaggtgttttttactttacatttaattatttggtactagtactaatttactacaaatgtctgaaaccaaatggatacttaacgaagtctatgctgtttgtccaggtcttttatcccgactagttatggttctaatgtaaaaagcagcttctagtggtgacacagtgcatatttctcagtgtctataaattcaggtctttggttttcacttaatctgaaaatgagagtggcagttacacactcaggaacactcagaaatacataaacaagttttgcattcttctctaaacaaagcctaaacccctgaaaacaattgttttatagtaatattttaacagctatttatacgtgttatctaaactgaaaatcatattcctgatcctctgactgccacagataccccgtgattagacttagtaaggagtgaccgtcctgagagattctgggaccgtgtcctgcctggccacatgggtaacagacccatcttgtagaaccacaagagggttggttgttgtacatcgtcaaataccaggctttgtgctgaatgtgccctgaccttcacggggggcgaattggtgatgatctttaggacactaatttttttctttattatttgtaattcttttgagcaatatgcctgactatgaagcagtgggtctgacggagtcagagcggttagcctgatccagccggggtcccaggaccaccgccccagaggactatgcaatgttctttatgtgtgtgtgtgagtgtatttgtgtttccaatttattgaagcaaagagggagggtagaagataaaatagcatggtcctcatgtcacgagagctagttagtgccttgaggactgtgctaaattcagctgctttttaaattccgttacatttttagtcttagaaatgcatttaaacctctcagccaaaaagtgagttgagatcatcagctacctctgatgatttttaaatttcaaaatctcatctcctgccttcacatgactcattatctctcttttatcagtatagtaagaagtatcttcctttaaataatattctcagattatgacttattaagtatttgctatgttcagagagggattgaaggaatacagataagattcctgtcttaaggagtttacattatatttggaaaagacaaactgagcatacacttaaaactggaaattaaatagatgctattgctgtattagcaataaagatcaaaagagatgcagaataatagtcccttctttagtgatcatgtatactgcattttatagtagtatgttttttgtttcttaatggaggtcttctaagtttatgttaaatctctgactgactaatgatgaagatgttttagaagtctattgatattactgtactgattggatattaccatgagtaattgttggccactctgcatgcctgcccacctggagactcacgtaagagtcaggaggatgagtttggcccagctctcctacgttttcttaaatgcattgcagaagtgtgtgtcaagaaatttcagctacagattgattcatatatgagtttaggaactcattcagtaacaacttttcagcaagtgtttagctaaatatgtttattcatgtttcctctttgtttcccagggaaaagatgaactattacactctgagctatgtctttttttaatggggctataccttttgtgatcataaaaattaaatgtggctgtgtcttggttttgcatgactgcattattaatgcaaagggttcccccatctccactttccctcctgtgttttacaggtagtcagatgcctccgcagccacccgggagccagtcagaatccagttcccatcccgccttgagccagtcaccaatgccacaggaaagaggttcgtctccagttcatgtcttacatgcctatagtgctttcaggcgataaggcgtacgtgagtttgcttacctatgcacctccttatcattaatttttttaaaggatattatgttttcttatcagacggaagaaataaaagcccttccaacaaatatggagaggagggaggatgctttcttgtaggttgggtgaagtgtggtcaaagtacagttcaaggcccaaagaatgtgtgtgtccacatagcaccatgaagcatggttcacatatgactgtagtctggtatttggtctagctgtgtaaaaataactgtgaatgactcaactagggtatcagtcccaatgtgtgtgtgtggcggttggcggtggggggttgtgtgtgttaatactggttattccctgatatttaatagtaagattttaaacccagagcaagaccctgtcttaataaatggtaagatcttagaactggagcagacctaaaagtttctatggcccagtcacctaaagcaactggggagtgtagcggttaggtgtgacttcccttattctcaggagctagttagtgccagtcccagaaaaaaagaatatgggcttttccagaaacctttggagagaagtggccccacatctgccagtgctcttgacctttagctcagtcctgcctgtcatccctgccgtgcatttcttaactgccttgcagagaccttaagcccacccatatttacctctgtcttcattatcccttggagtaggaaagctactcttggtggtggtggtggttttaatccagattggtgtattctggaggtacaagaagcctacctgtgcacccctggtgcggtggcaggtcacttcccttgctgtggggcaaggcttgtctgctccatcccacaacaaacgagagagataccgctgtcctgcactcccctcctctctcacacaggcccagaggccagaagttcccaccttggcagctaatatgtactgggctcctgacccctactgtttataattatttgtatatgagttgtagagatgatgatttgcttctgattagaattatgaggtttaagttattttacatgttacaaactcagcaacatgtttagaaactaatgtcaatgaaaagatagatttgctttctctacatatcatttgtgttgaatgtttcagagggataaaatgaatttttcattttctaataccattacatatatatattataatttaaggtatagtcgataatataatgttttaataatggaatagttcatggtttttaaacttcacagtgtgtgagaatcacctggaggacttgttaaaagagattcctgggccccacccccaagtttccaattcagaaggtttgaattgggacgttttaaacctccatttttggcaagttctcagatactgctgatgccagtggtttgaggaccataccttgagaaccactgccttctaatagtacaataataggtttttgaggtgggagaatcacctgagcccatggaggtcgaggttgcaatgagctgtgatcacaccactgcactccaccctgagcaacagagagtgagaccctgtctcaaaaaaataaaaatagattttaataattgtgtgaatatgtggatttgtttccctaaattctctactgtgacctgctccaaatcatccttttatcccatatcatctctctaaattgcttgatctgtgttaactcctcatatggctctggtcatcttgaaggcattatagaagtttatagtgtactggtgccaagcaagcgtgattcttactaaaatccttttttggttgtgagttgcacctgtgttgtattgttgggtcactgtggggaaaaaggaaattgtcttgcactgggtgcctactcgggtcaggcagagaactgagatgaagattcaccccataaccctgtaacatcactctcactggtacagttctttttattttaacaagtgttaaagggtaaaagttcccttatttgaaagtcttaaaattttaacctttattactaagaagaaaacaaagagaaaccctctcagatccttgaacaatgtctttcccagccctttccaacagatacgtgtttgggaaattgggcaatgtagaaaaccagatgtgaagaacaggacaacaattaggaaacttagctaaatcaaacttttaacttaaattgatccactttcaaggcaaaatctaggctctttagtggtaccactgtatggaaattaccatgttaatatgattattgtttttccttcgattgcctttattatatgtagtgtagtttgggtaactgataccaggtacataacaagctgggtggttataatgaccacttctttttttttttttttggagatggagtttcactcttgttgcccaggctggagtgcaatggcacgatctcagctcactgcaacctctgcctcctgggttcaagcgattcttctgcctcagcctcccaagtagctgagattacaggcatgtgccaccatgcccggctaattttgtgtttttggtagagatgagatttctccatgttggtcaggctggtctccaactcccgacctcaggtgatgtacctgcctaggcctctcaaagtgctgggattacaggcatgagccaccgcacccggccatgaccatttctttcaaatagtaaatataaattatataagttgctaaatgtgaattgatttttatgaatgtgatctctaaacctcctctgaaagactgtgagagacattattatattgttatagtttgttttcacactgctataaagaactactggagactggatcatttatgaagaaaagagatttaactgactcatagtcctgcaggctgtgcagcaggcatggctggggaggcctctggaaacttccagtcatgatggaaggtgaaggcaaatttagcacatcttacatggcaggagcaagaggaagagagcgaaaggggaggtgctacaaacttttaaacaaccatatctcgtgagttctcatgaggtagcactagggggacggtgctaaaccgctagaaaccacccccatgatccaataacctcccaccaggccccacctccaacatttgggtggggacacagttcaacatgagatttgggtggggacacaaagccaagctatatcactgtacattcccttttgtgtgtgtgtgttggttaggcaacaccctgaaaaggaaaactttctattttaaaatgactgttacgttagaagatgctttgccttgcatgagtgaaatttcctccagcactgggtagcaaggctttaaagaaaatggctttattatttattaaaacttaggaagaaatgttagctcctaataacctttgatcaaatgccacctgatcaggtgtctaaatgacagtgactttagtgctttggcacaataatagaaacatctgtttgttggaccatcatttggtatgtaccagcagcatacacaatggaaagcagatctaagaaaactcttactaggaaattccccaaaattcattcccccatattggaaagtaacttaactttgtttatactcttacggttgatatatacctaccttgtttagggaagtgctgaaagaaacaggccaagaaatacattagtgagttagtatctttttttaaaacgagtatatcagactgggcacggtggctcacacctgtaatcccagtatttgggaggttgaggcgggtggatcacttgaggtcaggagttcgagtccagccttaccaacatggtgaaaccccgtctccactaaaaacacaaaacattaaccaggcatggtggtgtgtgcctgtagtcccagctactcaggaggctgaggcaggagaatcgcttgaaccagggaggcggacgttgccgtgagctgagatcacgccactgcactccagcctgggcgacagagcgacactccgtctcaaaaaaaaaaaaaaaaaaaaaaaaaaaaggtatatcatggaaaccatagaccctgatagaaaaggtaatgacattgcttctgtactgctgagtgctgaaataaccacattgaacagttctgtttacacttagtttgttttaataaataagattctgataatatagtaatagtccaccatatacgtactttctttaatgtacccacaggagataacattttctttaatggcacggaatctagaaacacatttgcacagagacaagagatgatggagagtgagagatgatgcaacctacttctctctagaggtgcagttttctgagttctccctccaagtcctcatggggcagtgatgctggcaacactgccttggagcctaagtccccccagtttcaagtagctgaacccttgctctgatctttcttttctacttggtcctgtgttcccgttcaggaagagcatatgttaataaaccatgtaccctgtgtgtcagaggttctgcaaacctctggtgacagcaaggtcagtgaagtgcccagctttcctgacagcagtcctttgtaaacctgcagtccccgtccccaccccatctctttttcggtgcccattttatctggtggttttggtattgagttttgtcacaggacatcagtcacaaatccatttccccacattgtacacagatgaaaataactgtgagtttctacagttgatattttctatgtatagaaggtatttgtgcaagtaaatatggatatggcatcataggttacaaatggagggaaaactttagatatttattgggctctctactctcttacatagtattgcctcctctacatcttctgttttccagtataaaacttgatttagtattgtgctgctggaagttttctttgtttgtttgttttgtttgttttgagacagagtcttgctctgtgacccaggctggagtgcagtggcgcaatctcagctcactgtgagctccgccttccgggttcacgccattctcctgcctcagcctcccgagtagctgggactacaggtgcccgccaccacgcccggctaatttttttgtatttttattagagatggggtttcaccatgttagccaggatggtctcgatctcctgacctcgtgatccgcctgcctctgcctcccaaagtgctgggattgcaggtgtgagccaccgcacccagcggaacttctttttaactaaataaagaaaattagttcagattttttggcctttacttcttcattatgtacatgaattttaaagaaaaacagtaaaaacctcagtttagtattctgttgtaacacatttgccattggtttttattttaaacctctctgtagacctcatatggcaatatacagaaatgttactaaatcaccttgccaaaaaatcaagcagtgtaaattaggccaccaaaggcattggaggaacagttcagataaccttaaaatactgaaatgaatcttacaaaaattgtaggtgaccagttcacatttgttttatccttatttcttaatctttatatgtcttgaaattcaaaaagaaaaataggaaacggcttattaataggttgtcctcttaggaagtcttggaggaaatacggaatagtcatctgagtagataaataagtataataattattaacattaaagttaccacatttttaaccccagtgacacgttaagcttaatgaaactaacaaatgcccttctagtttattggattagcaattaggtgaaaatgctgaaagaaagcttatttatttggacagatgtagagaggtcaaaattaatttttcgaaaaccttctaattgaattcccttttaatttcacagtggtgtctagttaaacattcatgttaatgccggtgattttctgaaggtctgaactagatctggattcccaaaatcaacacaggttatttaaccctttttatctagtaagccagcagggactttcctagtgtaatcccatagtatttgaataattagaaggtcataatgaggatttaattagtccttgagatatgctgaagcagaacccctaggaacttcccctttcggacacagatgcaagcagaatggatgctgctccaggactgtgagccacgaggaaatgtattctgttgctggaggcagttctctggcaccattgtgtggccatcagatcggtgctgaaagcatcttaggtgaaatcttccagaattactgaataacagtccccccaaccttcatttctgcccactttccaacctacacaaggactggcttttcctctccactgttgaaaaagaggagttgtagtcaaagcacgctgtacctgattgaaaattggcttttgctttatcagcgacaccaacattaggtgagctgggcgagttgtgtattttctctatagttctatagagaaaatagataacaaaattttgtgttgttctaagcctctggtattttgtccagccaaacatagagatcttgacagctgtttgtcagcagaatcacaaaaatctcatctttggaatctgatgttcacagaggaatatttatcagtagctacatttttgcaaatacagacagtgccattacccagcaaagtgtgtagcagatggggcatgatcaggcatttcaaggttctttttgcgtactactacaaaaaggtgaatcaaaatttctatacttcaaaagtctgaggtttcaaaattacatattttgtttagactgaatagtcttcattattgaatatttcattattcaatatgtcttcattttttatatgctgcttctgttattaaccccgaatgttaactgccttggtataattttattcctactaattaatggtatattttagcttctttacaaagtctgagtagaattccttatcagatttcgagtcacattctatttgcatagtgcacaccttttggctgcgggcacatctttctcttaccttttcctgcaatcaggggaaaaagaatgaattcagtgtcttcctatgagttcaactgagcttccccagggcctgcatggccctcggtgttcatcccctgccagggacccccatgtcggcagcaggctggggcttcacagatgctcagcagagactgagccaaacaactaaagccatccagctctcacaccctgtcaaagcacaagacaaccgaactagaaaatctttattgtttggaattaagaaagcttacaattttaccaataaatactgtatgtcatttgctgtaacacagtgtttgtccctctgaactcactgttagtattttgagcttacacaagattaaagctactgctgctgctcccccctgcctctgttcttcccagatgcatttccatgactgcacagctgtacttacagtgggtgtcagtatgagccatagcccttgcacctggagcctggcactaaatggattgtgctgagtcccctccccaaccccagccgtgctctttatgacccaggggcatttagatagaaatatgtaaaattttgaaagttttttactgttgtcagctagttttatggtgatatttataccaaaagttattttttaaatgtgaaaattactcttgaatatctgaattgacctaattccttaatattcaagaatagattaacaagtcagtactgaaatgaaggagaccacccggataattgttaaggagttggaagtggggtttgatacttttttctgttttgcaacctacggaaaccgtgttgttcttctttctattggattcccggttgtaagtgtgacagtagatctgcagatgctgagatgtatcataagatatactggttgtcagaaaatattctcttaatctacctttctagttttaaagagtaagtgtatcattttcctaatgtatgctgtgtaagtttatagatcaccccggtagggcatcagcaataatctaccctcacccccagatgcaattaacttagcctccactcttaattgaagatcccttctttgtgatgtgtgaaagatgaaaataaactcaaatgggaggctttatacaaaagagaatatctagacaccactctggaaagctgcttctaatttcttcagcctcagaactctgcctctgtgctagactgtggaccaagccaaagctagtcagtaatgaaggcagtcatggcacaggacttgtgtcaggtttatcattaagttccttttaagccagctatccagaaataggttcatcccaaagctgggaaaacaaatgtcacacacaataggagtccatttatattcattgaggaagcatcagtcgaagttttagaacattttaaaagaagcatattttgttacttttgttatatgcagtaattttttgaattgccaattaaagtgggcttttaatacttaatacttatttgtaattggctcattattcttcattgaaagtatttgagaacatctggatcttaggtaaattcatggatttataacaacactttttcctgttccttttgtgttttttctgtctcagtgaaaaaccgttgtctttttccaaagccaaaaattcggaagccatccttgatgcgtttttctcccccgtctgccccaaactaattagtcaccaagttccaccaactcttccccagtagaggttcccacacaccccttctccatacccactatcaccactctagtccagacacctagttaacctcacagcctcctcgctgttcctcctgtccccagcctcatgcctttgagatcatattccacctcctcagaccggtgagagcatgtcattcctcaccacctatgcctttagtcacttgcctgtgccttggataaaggtgcactgatctgtgcggtcaaggggcctgtccttatccagccccggcttcctttgctggcctccctgtcatcacactgctttctctctcaaacacctgccacactgaacctcttgggatctttatataaactcttctctccaactggaacacttctgcagccatcccacctcagctgcacccccaccacccctgtgggtcttcttacctgtgtactttgtcctgattcttaaggtcctcagcctggctcttagtaggtgcttgagtcagtgtttgttgggtgaacaaatgaaggaagcataaccagtcaccgtgctgcccctatgggccaggcaccctctgaagcagcccagatgtgtacagtgttggtgacccattaacagctgggattacagttgattcacagttgaactctgttccagactccagaactctgcgagtggagggaccgtggccttgtcagtttcagaactccagggcctcatgttttacctgctgcttctcattttaatctgcagggactttggaatcagaagatctgggtttaggtacaagctttatcactaactagttttgtatctttggactatttgtgaaatgaggatcatggatatattgcacaattcaaataagattttgtatctaacagtaaaaactgcaaagcaccgtgaacatagtaaatgtaagatcaggttcagatacctcaggtgagacctgggtcgaaagccttaaaaagtagtttatttgcttctccagggcatagcgacgtacgtactttgtctttttcctcagcactgaagtggacttttgcagctaaaacttaaaggatttgtgtaaggaatgactggatcttctgtccccatctgtcatctgggtgctcagtctgacccctccccggactctcatttgcccagtgataggtggtataagttgcaggaccagtcagtagcggaaaggagtttgtggggtggatggggacagcttagaggttgctgtgcccggctccaagtatcaggctctgtggtagtggggaaggagagggagtcgttttgccagttaacctaatagcacagctggtgtggcgcggggggcctgggttaaagccttgaacgggccattagttcctgtcttcttcaaagtagttcatgttgtgaagagaggaaggcaggcaaataaacactgaacatagttaaatgtaacgagaatatttttttaaatctatttttctctccaaatggagatgtgacacctatttgtgaagagaaatgcctctgcctgtctttctgggtggagacaccacaaaggtggcgtggtatgtaaccgtggcacacacacatggcaaagcagcttttattgaactggcttgaagagacagatgccaacatgaaaatcaattgtccatgtgccaaatgaaaaacgtgcttgcttttcggtggcttctgttgccttggacgtcttgttggtatcctgacaatgctgtagttctctgctagctgacgaggcacctttgatgaagaaattaaatttttctgtaattgattttgtgctttcctgcatgggcctggccacgcacgctttctgtgtttgctgatttctctttcatgggtaggatgaatggtgacttgggtttcatgcttgactctactttttccaacaggatttaaagtttctaatgcttacattgcagaatttgttgtgtcccatgaagaggaaaagaatacacgattggaggctaaacaagatccatgttaaaattcctcccagttttatttccccaaatttcctagttttgctttcactttttatttgactttgtttctaactcagttttgtaacacccttcaaacttagagatatgttttcattggatggtactttaactggacccatccctggcgattttggagctttgacaacattgccctgtttaagttcatggagcttcatcactgtttcctttatgtcgtctacccccaaatatgctttaaggactaagtttacttttaaaattaaatacagtttcattctatttttgaaaatgtctaaagttaggtctctctcttatccagggaagaatttttctgtattcctactatacaaaaatattcattttttccttcttttatatagaagatgtgatttgcttataaggatgtcataaatcagtttctttaattttttttcatctgctaaggtttagaaagcaacattggatctttgctgtaaagattatctcttttacaaataagagaatcatatatagctttttttttttttttttttttgctgagacggagtttcactctgtcatccaggctggagtgcagtggcgcgtctctgctcactgcaacctccacctcctgggttcaagcagttctcctgcctcagcctcccgagtagctggaactataggcacatgtcaccacgcccggctaatttttgtatttttagtaaagacagtgtttcaccatgttggccaggctggtcttgaactcctgcaagtgatccacccgcctcagcctccaaaagtgctgggattacaggcgtgagcctctgtgcctggctcgcatatagcattttataaactaggtaaagtctccgctaaccaaaccacagataggacactgctgcagaacacactggaaaggtctggaaaactcacttatctaagaataacacagggacatgttttagaaatgctagtttgtttaccactgggtctcaagcacctatgacaatgactggcttgtcattaggccaactaggccagttttgcaagagggcagtgaagggatttcttgtttttaattgatagaagaaaaatgtctcttggcttagtctttaacacaggtctccataatagagattgaagtagcgtttttcctagacttacgcgaacactgcttacattgccatgtaacaagaatggattattggaataggaatttttcactgatgctaatattactattcacaagagaatgcccctaaataaaacagtcctttcaaaatgcagactgaatgactccagggaatatcttggcagcccaccactacccctgtctttagctattagatatacaaaatgtggaattcaaacaattatcaaattgtattagaatccattatctaaattaacaccatgtaacgttgaaatgaacttgaggacaagggattcgcctcttagcatgtggtggaaacgcgcttgcccgggtcgggctcataccctcacacaagctctggggcagcagaacctgccagggcaccatttcctaggccagggtcctgcgtgctctaacttacagctagaaagggaacagtcttctctttttttttgagacagagtctcaccctgtcccaggctagagtacagtggcgtgatctgggctcactgcaacctctgcctcccaggttcaagtgattatcctgcctcagcctcccaagtagctgggattacaggtgtgcaccaccacacccagctaacttttttggtatttttagtagagaccgggtttcaccatgttggccaggctggtcttgaactcctgacctcaggtgatccacccgcctcagcctcccaaagtactgggattacaggcatgagccaccgtgcccggccaggaataggtttcttagttcagactggttttcctttaacccccacaaaaaacctaatgggttgtttcatccattaagacaaatgtttatcaagctactcactgccatgggtgcttgagatcccatggtaaccagaagtcagggcccttctcctcacattgagagtctattcagatactcgatggggattttgagatctttctctgtctctgtctctgtctctctctcaatctttctttctctcccccccgccccccgccccccccccacacacacacaagcaaactctggggaatctgccagatcaggaaggatgtatactgcttcttaggccgcccagagctaatcagtactatagctgttggttgagtggcctaaaactgacaagctgagcttttctgagccaaataacatggtcggccaattatttctggaaccatttatctggaagggcacaggactttctgcatagtgagctaagtgaggcaggatccccctcagctctagctggccttgtagaggaggcgtgggacaggcaggcccagcctggagccaccactccctaggggcagcctcggaaggcgtgccaggaggctcacaggtgtggcattgcacctccagagattaaccaccatccaaggacttgcagcattttctggcttcactgatgaatggtttgtagggaaacctggcaagagaaattagtttggaaacttggagtcaggaaataaatggtggattgcattaaaaataatatgaataatagtagctatcatttattaaacctctagtgtgtgcaagcactgagctgtgtgctttacacattttctcgtttaatcttacaaggtaggctcagttgtcatccacatttttcagaaaaggaaagtgatgctttgcagctactaacgtgcccacagctgctgaactagtaagtggtgaagacacgatttggcccaggcagttggtctgcagagccctcactcctcacagcttcgcagtggctgtggagatggacagggtggatgcgtctgatagacatttaggccatggaaataattgtgctttctggcctagtagactcgtttttcttccttgccttgctgtcagctatcagttgttccttctcacaacagtcctttcttggacagctgtctccttttcctcagaaatgattctttggaaacaccgtgagatgaagaacgaaacaatccaatttattaagccacttttgtaaagtaagagcaaatgggtctgaatgaagatggtttatttttcactaagaccacatgtttttggttctaactctatgccagataccttgcttgggcagatgagaggagagtgtgttttaaagcctccagaacttacagtctggcgagagaaacagttgcacaaaaaacaatagcagtatgctaactgcacggccacagctaacatacgtggtgcttttcatgcttataaaagtgactgctttcctggaagggcaaggaatgtcatggaagatagcactaacagagtcatacagaacaggtgcacatcagctgtatgaaggcaagtggccttctaggcacacctgtaaaaacagctggagcaaaggacacagcacaccatcttgttttttaagctatgcctcccattagtggatctttccatgatatgtaaaatatcagagtgcactgtacataataagggtcaacattgttctggaaaatgtagagtgtatgtgaatagtatatgtaagtatgtaaacatatgcacattggatcatgacataaaatatgtctctaaagtgtggattgttgaaaaaaaaaaaagtttgaaagtggcctcacaaatcaacctctgtgagcctcactgtctttaggttgatttgaagctgaaatgggctaataatgaacaagctgttagcatataatatatgctcattaaagatcagctgctcataggccagggaatggcaccttacctagaacctgagaatgcagatttgctgagtgactggatgtgcagggacttgcaggtctgaagcaacccaggggctacagggagctcagagcctaagtgacagaaccagaatgggagcacctggtgactgcgtgtccagggtagggcggcagactcgtgtgctgggctaagtttggccttcagccagttgaggagtcaagagacagtgaatggtttttgaatgaacacagatatctgcgagatgcagaaggcggttcagtgcccaagtgtaggcaccagccttgggcacaagcagaagattttcttcttagaggaggaaaaccaataagcctcgggcctggctggagatgctcaaagcttagagggcaggaagtcgtcaatgctggcttttcttgtggtgtgggtggtcatttcttgacagttggtagctgggctacagatggtttgaagaagttaaaattctaaaccagccaagtaaaagggtacctcaagtgacctctagactcagctgaatgcaggaactttagtttccaagtccatgccttgggacatccactttggatgacacccactggttgcagtggagcctctcagaagctgtctggccagatttgcccgggtctttcctacacgttgtttaggtctcagctgaaatgtgacttcttcgaggaaaccttccaccatcccagtctaaattgggtcttcccctgatactctcatagcacctgtgctgcttttattctccacgtcacacactgactttgagttatttgtcagatgtctgtgtgtcccgctggaatgttaattccatgagggtagatgttgcctgtgcttggctcattcatgcccctggcacctcgtgaatgaccaagaaatggaagagaaaggaggtgatatttagttgactaagatgttacttttcttgtctcatataaagttataagttgcttcgtaattttagttcattatttttccctattgataggcttttattttctgttcaactaaaatttcagttcctcgagggcaaggatcacatcttttgctttttaaaaaatactctcttattcctaccacagttccgagaatgttagagtaaaataggtgcatgctggtggaagatttgtgtgacattactgtggattgagttaccagtttgatagctcagatagaaccccgcgcagtgactaaagggctcacagaatcactataaaggcaatagtaatgcctttgtatagggttttcatggtggttttcagtttagcagagcatttgtgcatggatttttcttatttgactctcagggtgaatgatcttgtaagccagagcaagatgtgcgttcttcactttacacaaaggagcctgtggacccacacagcgaatgggagacgcagcctctaaacagatctgcttccaaacaaatccatagggggtgtgttgctcctactccactaccttaacttctctctaaggatttttcttttgcttgatttttttttcccctaaagggcagaaagggtagtctggttttaacatcagaagggtatctctgcatttggaatgtggtagtacaagttcggtgactgtatgagcatacagcgcaggactcaaaactaggaaattccctgatcagaaccctggtgcagatttatgttacggatgaatatattaatcatattttcatatgaggtttcgaggaaactttgttttgtatcatgtagataatatctaatttagtgctttgtctaaagtttgaattttcccatgttagatatttacttgggaccctataattccataatacatttagtaattcaatatactttcacaatatataggaaattcattttatattttctgaatttccctaaattcagaaagcgtggtactctaaactcagatggcttatgactagaaaaggtcacaccttttaaagacgcagctgcgttccctcagctgtcaggcttgctattcgcaaactctgttacaagacaccatcttagaagaatgttctgaaaaaagcaagatgcaatcaaacaaatatgtcaccataaataggaagaaaagtcttagttgaaatctgatttcttgggaaacattttaaaatgtatttctttcaaaaataaaaatataacaaaacaagaaaagaactaccttcgaaataaatatacttggaaattgcagacttgatttagatttcttcctaggaaagaaaaacgtttaaaccagaatcatagacacctatagctggaagtgcccctacaactattgagcgcaggtgaggaaactgaggccaaaaaggtgaagtcactggctagaatctgcacagcagacgtggaggccaggatgagatcctcgcccagtgctctcttggttaccatgctacctgtcctgtacccttgtttgaatctataatagtgacaagaactggccgggcatggtgcctcacacctgtaatcccagcattttgggaggctgaggcaggcggatcacaagatcaggagtttgagaccagcctggccaatatggtgaaatcccgtctctattagaaatacaaaaattacgcctgtaatcccagcactttgggaggccgaggtgggcggatcacaaggtcaggagatcgagaccatcctggctaatatggtgaaacccggtctctactaaaaatacaaaaaaaaaaattagccgggcatggtggcaggcgcctgtaatcccagctactcaggaggctgaggcaggagaatcgcttgaactcaggaggtggaagttgcagtgagccaagatcgcgccactgtgccactacactccagcctgggtgacagagtgagactctgtctcaaaaaaaaaaaaaaaaaaaaaaacaaaaattagccaggcatggtggtgcacacctgtagtcccagctattcaggaggctgaggcagaagaatcacttgaacctgggaggcagaggttgcagtgagccaagagtgctccactgcactccagcctaggcgacagagcaagacttcatctcaaaaaaaaaaaaaaaaagctactgcttgttgaaagcttcctgtgagccagcccttttatgcatgtttatctccgttaatcctcactacaaccctatgaggtagatatgattgcccccattttacagatgaggaaactgctaatagacatgcatcgtttctgtatttaggatgaatagaaatacttcatttttagctaacttctgtcttctaattttttatcaatttgtttaggagattatggcaatattcaataacctttaaaaatatccataatggattacttttttagtaggattagctagtgttggcatttaattgtgattttctattatgtgtcatgtacctacctcctaactggtcttctcacgtgtaacctttctcttcctcttcaatcctttcttcatgatgcttattacagtagggttagctttcaaaaatgcaacaggcatggtggcccacacctgtagtcccagctaattgggaggctgaggtaggaaaatcacttgaagccaggagttcgagaccagcctagacaacatagagataccctgtctcaaaaagaaaacaaatgcaagtcaggtcataacacttcctcttacggcagtatatggtctatgccattattacaccaactgaaagaccagcttttcacaggactgcagatacagaggtttgggtgagccatgcagcaattcatctgttaacaggagctgtacctgccagatgaaatacttcatattcaagagagagagcgtgaccaatagaaaaagaggcaaacgatataaacagacatttatagaaaaggaagtaaagacagctgtttaacatgttcacatttactcttgataaccaaaataaaaacacaatcacaaattataaaatatctctgaaagaatacattgaaaaaccatttgcctttggccaggggaactctggcagaagacagggatgtgagaggtacttcccataatacaccctttttaaccctttataatctgtacacagttacccaagtgctggagtaatgtggattccagacatttaaattaaaaacatgtagaaataaaaacttgttcatcccagctggaagcttcatctgaatttataggctatccaagtgaaaagatatttttgggagtttataaaccaaacattaacattataatgtcttaactttttttgtatatcacatcacagattataggacactttgacatattatctcagttgatcctcacaggatccgggactgtggctcagaaaggttatgatttgcttaaagtcacacagcaagctgtattcaatacccactgcagtccatttatttacatatctgtctcccctactagattcagagctcatgacgcaaacaagaccacaatctacgccttccattcccagtccactgccgttagatgatgctggcttagaaaggagtcagggaaatgtgtcagcttcctctttcatggtcttggggaacagggaaaggggtgagtctcaccaaaaatagaaaacaagatttcaggaagctcttttaagtggtgccattgcaaaagtaaataatacaaagaaaaaaatagctttcaagttgtaatttctatgtaaggaggtagattccacacccagttgaactttgtccctaaggtatgggaaattgatactgtgaagcagcctcatttgaattcgctttttaattctacctccttttggaaactccatctcctttttgcaaatgtgattttatgtgaaatgccagtgacaattgagatagttcaagtggaacactacatatgtatttttaaggactgagtaaatagaaaaagaaataccttgcctaggtaagaattcttagcactcatttgaacaaaccttaagcctataatgagtgtcacagaggccacaaaaacttaagagtatcgtatactgctgggcgcagtggtttacacctgttatcccagcactgtgggaggctgaggcagacagatcatttgaggtcaggcgttcgagaccagcctggccaacatggtgaaaccccgtctctactaaaagtacaaaaatcagctgggcatgatggcatgcacctgtaatcctagctactcaggaggctgaggcaggagaatcacttgaggttgggaggtggaggttgtagtgagatgagatcgtgccactgcactccagcctgggtgacagagtaagactccatctcaaaaaaaaaaaaagaatatagtatattatcagagcttccaaaccctttggcatggacaccttcatggttggagtgaaatttaatgctaattaaagggcctgtgttattttccttaactaaggaagaaaaagcaatcgttcttttcaaagaaagtaaggggagacccacatgatctctatgaaattgaaacacatttttttattaaacaggactctatctgaaacacttgagaattttatagtaaagcttagataaatatttcatgtaacatcttaagatgcaatcattcatagtaattttagtgctctgatttctgtttgttttcagattgaataagcaaatgttttctatgatggtttatatctggaagctgccaattgagcccaatttcataaggcttatctttataaataagttaaataggataataagaaatagttcaacttacttttattttatgtctatctctttaaacagaagcaatgttagactatatctctttttttaattgaaatgtaaactgtggccacctttgtaaatacaatatgccatttaacctccttaagccaaacttagatctgggattatcttaccctccagctgcctcagtggattttctttcgaagctactgctttaggttctcctgaagcagaaacctgcccgtctccagctagagccttcacctggtaacgtgggcccctctcccgaacataaaaccctgtgttctgagagttgtttttcaaactgtcctttgttagtgtgctagatggataatgtcagctttttctcaaatctatcttgatttggggtcctctttgtcctaatgagtatttcacagctccatctatgaactcgcttccatttgcctggactcctgagagtggaggtacctggccttccagtgatgcataaagatgtgttttctttatccatttgaatcatctacccaccaagcacctatgtgtcgtactcagcactctgttggccgcatgaagaatttaacatccattcatttttttaaaaagcaatagttttgttaaccaccacgtcccacacgctctgctaggcaccaaggatagtgaacccaggtgtgattcttgccctcatggagctaatgttttagtggggaagagagatgataagtgagtcaaaataaaataaagtgattaccagtgattatgaaaagtgctatgaaggaaggtgagtgggaaagggcaagggttggtgtgacctctgatcaggtgtcgagggagggctgagggatgagaaggacccagcagtgtggagagcagatcgtgggcgagccgggaggagggaacgggggagagaggctttgctgagggaaggagcacgatgttgtcttctaggaactctgggacctgcagtgcagtggagggggagaaagctctaggaaatggggctgaagggagaaaggcagcagccagagctcacgaggtctcacagacagggtcacgtgtgcattttattctagcgccagtgggaagccttgatgatgttttgttttgttttgttttgtttgagatggaatctcactgtatggcccaggctggagtgcaggggtgccatctcagctcactgcaacctctgccttctgagttcaagcgattctcctgcctcagcctcctgagtagctgggattacaggcacctgccaccgtgcccggctaatttttgtatttttagtagagacagggtttcaccatcttggccaggctggtcttgaactcctgtcctcgtgatccacccacctcgacctcccagagagctgggattacaggcatgagcctccacgcccagccagccttgatgagttttatgcaggggagagatatgctctcatttccttttatattcctgaaagttattctggcacctttgaggaaaatgaaccaaaaggagcaagactggggttagcaaggctgagtggtcggtggtacagctgtggtgtgggcaggagaagacacaactggggctggctttggtagaagtagaaataaggaagaagtaccatgcacgatctatgtcggagcggagtcaccaggatgtgctgatggatggatcacacttagaggaaagaaggaaagggtggccttgtgggcgtcccatgtgtctgagggagcatttggaggagtggcagtaccagttacagaggtagataagtctcaagacccaacaggtttgaaggagaaagtcagaggttctgctggggcgcagcagaatacagcgcaagcctgcagttgttggcagttgacctgtaaggggtagtgccgagtcaggtattcagaagtctgcaggctctttaggagccaagtttaatggttactgcttgaggacaccagaggggagaaaaacagctctgtgcagggaagagctggtaccctgggtctgacgagtgggatctttgaccagagagctgcatcccacagattgggcagggagcaaaggcttggagcaggcacgcacggcatggccagcctttcaggggcagagggtttgcagtacagcagtcggtcactgttgctttttgtagggattttatctgcaagagaggttaaggtcatttgccttttctcctccttctcccctccctaattgaagtccacaagccattggcttcctgggaatcctcttgggaattcagggttaggaccagggtttcaccagggcaccctccagaccgtccacgctgaactgagatgtctttagctattttttaggagaatcttatggtaccagccttctcccctgccacctgccacatcagtccatgtccatttttatgtatgcagagattatgaaacacctgcatttatatgtttccatttatttcccacttaggttttatggcaggcacacaaagaaaccctcagatggctcagtatggacctcaacagacaggaccatccatgtcgcctcatccttctcctgggggccagatgcatgctggaatcagtagctttcagcagagtaactcaagtgggacttacggtccacagatgagccagtatggaccacaaggtaaaaccaaagcttctccaaaatgcatggcagcaagttgtagaaattttcttaatgtgctagtccttcaagattttaatattgtaaacatatcgtaagatccattatctgttacctgacaggtttgtgaggttcatacaagcccacagtactttagctgcccataatgatgggaggaataattacagccactattggtgaaacatttatgtatcagacacttgggtaggtgctcatcatccttgtgttactagtgaagtaggggacccctatcttctgtgacgtggttctaaacgtagagaaaaagacacaagccacgttctcaggtttctgatgtcaaacttgggctttgttgggttggattctggtttggcccatccctcttagtgatcaccgtcaaaaccctgagctgacggctcaggacggcattgccccgcacatccctcccagtttctctccgaggtgccgcatcaggtcagcagtagttctcactttcccagtcaaccccagtgtgactcttcggagacaggacaaagcctgaaatggttacatgtctttcacaagagaagataagggaggagcagagaactagtggaatcatgtccagcatgcaccattggccttcctccttcctggaagtggatgtaggttttgtcagatacacacagcatccttttatcaaggtttttaacctgatgtgtgtaggtatacatatatatatgttttttctaagtcacttttagcaataagacatttgaatttaccaccttccttatattttgtttatttaaattagacatgagtggataatttagagagaatgagataatctggcacaattcccagagttctctcacttctgaaaataccaggaacattccaggtgaagatgatgagtgccactgggaaactgtagtaaaatgtttaccacttctacaacaaaaccaggtttgcctggtgtagcgccttagtatttcctagaggccaggcaaatagaaggtgaggcccagtcacctttttacctgctggttctcagaaaatcgcatctttctgatgtatagtactttacagcttgaaaagcgagttattatcttgtgttctgaagatgtttttccgaaagatcttaaacagtttcagtgctaccaatggagcattgtttctttgccttagagggctttgttatatttactttccaaatatttctgttggtaggaagactatggggatacccaagaaagcaaacgtctgtatagagcctctcctgcctttgttctaggcttgtcctgagagtgagacttggtgttttgcccaattctctttatatcacatcatcaagagttttccatgttagtaattccagtaagcgttaggaatttcagtcccagttgacagtaatggtctgcttgttccctgtcagtgcccggtaactatgacatgtagcagtttgttgcagagcagaggcaggactgtgggtcacccaccatccttactgaacgtggtgggtgtcgtcaaagccaggtttctttagctgtcatggaaagaagagagcttagtggcagttggaaaaacggtttgtaacttgtggtaggcacagaaaatgcgggcttttgctcctaatgtaattggaagcaagatgcagaccttgttctcagaattgggtgtggctgaaggtctaggagttaactcttaagtccataagcccttcctggactctgaaatttgtctccatactctcaagtaattcaatcttgtagcctctttttctactcatcatatgtgaagactgagccttgggctatctagtaagtcttttgtgaacaactaaggaagaacttttgctataggaattaatagcagggaaggaaattactatagaatggatttttttttttttttactaaatccctgtttttcagtatcattgaatgtgaagactcttaatttaagagcactaagcccaggagagttcttatccaaactgctgtgtctccttggaaaactgcttactctttctgaagttctttttgtctagaaaatgagaaaatgagattatattatgttggcatttgcttccacttctaatgttctacgaataaagccttgcttcagttccaggacctttactgttacggtagcccactgggttcctgcatcacagttcagctttttgtttgagtgttttaaggcatgaaccttgagtgtaggttaatagtagaaacgatctgaaatgagaatgaatattcccacactcagcactctctggtgcctgaaagttgggcacccctcccagcaccatgcacccttttctcctctcctgagtgacactgccaccttgttcccctccaaggcatatgtgctcctgggttcctgcatcagctcggagcgctgtgtgctgtgagggtcctggtactctcaatgtccaaatcaaaatcatcaccttttccgccttggagcctcctgtcctcagcaaacactcagcaacaggagatcacatttgcaatgtgttgttgagttcaataaatactcttcactttttctgtctttgttatccttttagaaagggatcctaataaagggttttttttctttctcctcttgattaactactcagattattagtgacatattcagcttccttctttgcattagaagtgttcatatctctggaatgattcactcatgcagccacccaagatgtcatcagtctcctttttctgtttttgttcttaacttcatggcttgcttctggttttgcttttttaaagaagtttcaaatatttcacagccgttttactcatattttatatgagaagcttttccaaaattgttagtaataacaaccagcatttattgaacatgttactatgtcctgggtcctattttctaagtgttttttatatattaactcatttaatcgtcacagaagttgctgttattactccactttacagaggaagaaactgaggcacagaacaggtgaatagttttgcctggatgcacagtgactacaatggtcaagccaggatccaaacccaggctgattcacccattctcttaattaacgggaagccctctgaggctgtctctattttgtaaatgagaacaccaaagccttgagaaatttaataattcggccatgatcccacagctgttacagtaagtggctgggccagggttcccaccagcagaaactgacttacgaggggcctctcgcgtggtcattggcggtgttgcttcccacacctgagctgcactgccttctcaccggttcattcattcagtaagccactagggatataaaaccaaaatgacaaataacttgcctttaaggagcaagaaacaggcatggaaacatatatataaaaaattactggttgggcatggtggctcaagcctgtaatcccagcactttgggagtccgagacgggtggatcacttgaggtcaggagttcgagaccagcctgggcaacatggtgaaacactgcctctactaaaagtacaaaacttagccgggtgcggtggcacacgcctgtggtcccagctacttgggaggctgaggcacaagaatcgcttgaacccgggacgtggaggctgcagtgagccgagatcatgccactgtactccagcctgggtgacagagtgagaccctgtctttaaaaaaacaacaacaacaacaaaaatactaaagagattaagaatgttgctcatgcccataatctcagcactttgagaggctgaggcaggccgatcgcttgagcccaggagtttgagaccagcctgggcaacatggtagaaccccatctctacaaaaagatataaaaaaattagccagttgtgatggcacacacatgtagtcccagccacgcgggaggctgacatcagaggatcacttgagcccaggaggttgaggctgcagtgagctctgatcacaccactgctctacagcctgggtggcaaagtgagaccctgtcgcaaaaaataaaataaaataaaatttctatgatgtgaagaagggggaatgttagaaatgtatattagtactataaaatctgaatttttaaataaatgaagccaatataaatgtgtaaaaatacttaattacagtatattttatgaaatagcactttgccaccttcaagcaagcacatgtaataataactacccttgcaaagtgtttgcaaggaaagaggactgtggggacttgctttaataagtagaaaggattatgtaattaacatgttaattattaataagtgagtttgtatgggaaaaagagagctaaaatcaatttcatgtccatagcctttttatttcttaaggacaaaactatcttgtttgttttttgtgttctctagaggaatgtctatcacactgactatccagaaatactttttgcatgttgttattagttacaaaatataaacactcgggccttagttttgctgtgagtaagtagagttaccttgggcaagtaacagtagttctgagtctagattgctcccaggcctcactcactctgtaatagcctatgggagtctgggaagggccaccacacacagccatatgggtcgtgctgacacctgggtttatgcctgatttttattgtgtgtgtcttagaaagcagaggacttacaagtaggtgtaaattatttctaaattactttggtaaaggtgtttttcagaagggtttaaagattttttttttcactaaaataaattagatgccatctagaaattttccttttcccttcattcattatatgtgtctcataagttcaacaaaggcaaactttaaatgatattcagttgaaatgaatacagttccaaactactgaattacacagcaatactcttaaattgtggttctagaggggcaaggtctagatgtcaagagttgtggggcccctggctacttgtgggtaccttgtaggccctgcagtcactgagacccaggatttcagtctctactcttctaagttcagaacctccatctttggttggttggttggttggttggttggttggttggttggttagttggttgttgagacagagtctcactctgtcacccaggctggagtgcagtgatgcaaccttgactcactgcaacctcgagctcttgggctaaagggattctcccacctcagcctctctagtagctgggaccacagacatgcaccccacgccgggctaattttttttgtattttttgtagagacaaggtttcagcatgttgcccaagctagtttcaaactcctgggctcacatgatccacccacctcggcctcccaaagtgctaggattacaggcatgagagaaccttggtcttattattgaattggcttaaatgcagctgctcttctgcagatgtggggtctgtctgccacatagattcattctgtgcagtcaaaagacttcccctggatggtgatgcagattgacaagatcctcttctctgacgttccaaagactagattctgtgcaggtcactcgcccttcagtgtgctcattttattgttttcttcaaacaggttgatgcacttgataaggccacagcttcttcttatcttaaccttgttttttggttaaatcgacagtgcaaagcaaaaggattaattccttcttctatactgttatgttttactaaggaaatatactaaatctgttttgctaatattagaaaaaacaaaaattgaattggattatttcatagcaaaggataggtgaacgtaatcaagtcttcttgtgatgcctgaatctagccttcaagttataagacgtaagcgtgaatttttcttagactgataatcatcatgattttgataagatcatcacatcatgatcttaacaaaacctgggaattagggagaaaaaggaaaatatacagtacaaatcaacttaaaatgaaaaaagaaaaaaatcaagcaactttaattttgactcttgtgaggctaattgttttactgcagtaattaacatcagcagtacttaagaggggcacacctcctgccctcaccgtgtgaccgagcgcaccaccgtacgcaccatgtcaggtgggcttcattaagacagcggtgggtggcacctagagaggcagggtgtggacatgcagcttcacttgccctcttagcaaggtaccttttcccgaggtccatcgctcttccatttattcgaatgtttaaaaggaaattacctgttgacacatttcacaaatctgtcagagctgcaccaggcaccctggagaagggtccctccacctgtggttagcggcagccgatcgggaccctccctggcccgcctgcagggggtgcctttcccctgcagtctgtgtggggcatgcagtgcacagcagctgagcctggagacacagcctctggagtgtgcttctgatggttagacgcattcggttcttaccatagagacttgactgttcacactgcagttgactattgggttgggttaatagctatatatatatatattaaactatatatagagagagctatatatataattattattttttttttttgaagatggagttttgctgtgttgcccaggctggggtgcagtggtgcaatctcagctcactgcaacctctgcctcctgggttcaagcaattttcctgcatcagcctctggggtagctaggattacaggcgcccaccaccatacccagctaatttttcatatttttagtagaggcaggttttcaccatgttggccaagctggcctcaaattcctgacctcaagtgattcacccgcctcagcctcccaaagtgctgggattacaggtatgagccaccgtgcccagcctttttatatattttttaatgtcagtgcttaccttttatacattctatttaaggaataaattgcgtatctgtgcgtgatgaaagtaaaactagggatatagtgcaatatgatgatgtaaagatagtttctcttcactaattataaagttattagaacactttttgggccaggtgcagtggctcacgcctgtaatcccagcactttgggaggctgaggtgggtggattgcttaagtctaggagtttgagaccagcctgggcaacacagtgaaaccccatctctattaaaaatacaaatattagcctaatgtggtggcacgcgcctgtaatcccagctactcaggaggctgaggcaggagaattacttgaacccgggaggcggaggttgcagtgagccgagatcacactactacactccagcctgggcgacagagtgagaccttgtctcgataaaaataaaaagaacactttttgcctattccttggctgattttatctattcattgtcagttgtccaaccatagttactatatttttttccctgcagcaaccacatgagacagagaatcttttattgtaccctttttatagaggaagaaactgagctttggagtaacacgtagctttccagaggtcacctgcccagaaccagatggcgagacccacctcctgggaggcctttcttcttcacttgctgcctcgatgtcagatgctggcctctgagcatacccacgtgtccttggggtccgcctctgacgttagccctggtccgggatccgcttctgccccgggagaggcagcggccttccacatggctcccttcccctcagcactctgcagagtcctccctcctgtgtttctcatcatcactctcgtcacctcatgacatgttcttgatttctttacttgcctgtttcctgccaccaggacataagctcttgtcttcattcactgctgaatccccagcatttagcacagagcctggcatgtaagaggcccttaataactctttcttaaatgaatgaattttgctaaggcagagtaatccagagtcactgatactccgtcccctcctgccttgaagcttgaccagtattgggttgaccattcgatgcctaagagcagtacctggtatattatccttgtggagtgagactaaggataatttttgtctgtttctgtgcttccatattttctgcattgagcgtgcattactttgtaattaaaaaggaagacaataattgttgtaacataaatggaaaaaaactaccaaaagtgaaacattgaagtgacactgtaaggtaagataataggtctttctccttcttttacacactttgtgtaatattgtaagttttacattttaaagaattttaaaatgcatattgacctaagagaaatatggtaccttatgtatagttcagaaaacaaattctctctatttattcccacaaataggatttaatgcaacttgcggtaagtcagctttcattttgatgaacctgtatttgtgatcatctacttgatgcatttctctggctgaaagagcagcattgtgtgatagatctaagtagaaagatagaattgaaagaagctgtattgaaatagaactttatttttcacagaaaagatcttacttaaatatgataaccagcaaataaacacatggaaaatcctcaaaatttttttcattagggaaatgaaaactaaagccacgttgatttctattacatactgattcgaatggctaatttttttaagttggaatatcaagtgctggcagttagaactctcacacagtatttgatgggaatatatacaaaatagtacagccacagtttggcagtttcttataaacacgtacttaccatacagccagcaatctaatttctagggttttaccaagaaagatgaaacatattcctaccacacaaagacctgtatacaaatttttagcagctctactcgtaattgccaaaaactggaaaccatatccaagaatggactactactcagcactgaaagggaatgtacagatgcatgcaacggtgtggatggatgtcaaaggcataatgctaagaagccagccacgaaagcctatactgtgtgactccatgtgacgttgtagagaaataaaatgacatgaacggaaatcagatcagtggttgccagggggtggcatggggataaggttgacttatagaaggggaagagggaacttttccctcctttcatttcttgtgagagaaatattctgtaccttgattgtgctgtcgattacaggattatagaattttttatatctcaatatagacatgacaaagccgggcacattggctcacgcctgtaatcacagcactttgggaggcccgcgcgggtatattgtttgaggccaggtgtttgagactagcccgggcaacatgacaaaaccctgtgtctactaaaaatacaaaaattgccctagcatggtagtacacacctgtaaacccagctacttaggaggctcaagtgggaggatcgcttaaactcaggaggcagaggttgcagtgagccgggatcacgtcactgcactccagcctggatgacagagcaagactctgtctcaaaaacaacaacaataacaaaaacaacaacaaaaaaaacaatattttgtagtaactgttataaaaatggtaaacatcactggctacaaaacaagataaatgcatatttagccctaattcacaactgcctttatcatagtatgtagctaattatgcatttcttttttccacaagggtaagatttctgatttattgcattcacctccattttctcctccatcatatagggaatgacgcagaaccttgcccatagtagttgttcataactgttgagtgattggaacttagaagcaaaatttcgtatatgagtggaaacatttagtagtttacaaaaagcagtaagctctgagtatgcattgcaactatcaactttaaatattctggagtcaggtatagaaatttttgtgatctgcctgaaatgatgatggtgacttgaatagggtctagcttctgcttcctctctctggtgcttgaatggaactcctggtgggtagaaatctgaattcatttggtgaccaattttccaaagctagtgtgccaagatgaacccacttgaaaactgtgggtccttggacttggctgcaagaccagtccagctgaggtgggctggcccagcatctgccgccttcattgtgcttaatgctggatccatctgttttctgtcaaagccagtgccaacaaattactaacctattagagaaacatggaaataagattgcacttctcattcctggcttttcctctcatattttgcttggcttacatatttggtttttgtttattttgggaagaaagatacgttatcgagtagttggggggggcatgaatcatttttcaccccatgcacacatttttaaaagatggggggggtgatgttagtgatgttgttatggccattgatgacgatggcagctgtcatttgttaggcagtgcggtgcctggcgctgtacttgttactttcaacctcttactcattatcgtagtcactttacagatgacagaaccacagttcagagaggttaaaccacttgtcacgctgctagggagtgtcagaaccagtattcacacccagatgctgaagcctgtgctttatccattgttgccttttaaaccgttttaagcctttagaaactatttttgtccaggcacgtgagtctaatgaggaaagtttcaaagaaaagaaaaggggactttgtatttcttctatccaatagaggcttctgtaattagaacatttttccttgacatgcacttttgagtgccaattcatggaatcaacccaactgattggagagaaatagattggcacccctggcctaagcgcctttctaagcacaagtgcacacacgcgtgtcttggtgtgcatagctgtgctcgaacgcatgctcccccaggttgcagatgcttcctgccaggagacgaagaccagctgccgaactgggcaaagctattgaaacacagctcctctctctttagtatataacatgagtgagagatggaggtagggtacagagtaacttaacatctcagtagtttctttcctttgtgttcattaagatacagcccttgactcccagttaaacccaggaggttggagtgccagcatttccgcattccagctataagcagaattctacaaactcagaaaccttctttctctaataaaaccgcatgatgggtatagtctaaacgcttgttttctaaaacaagactaaaacgttatttcatttccttctaaagcaaagggcacataagttttcactgaaaaaggtttcttaccaactgagtcacttatccagtgttaggggagggtggaaactagccctcaagtaatggcatgaatatatgaattaattacttgtgcattcaaactatgaatgagtatatttatttttaataaaagcaagagctaagaaggagcactgtatttcactgatcttatcagatcatctggaagcgaaggggatgtgagcttggggaggaggaggaggaggagtctgaattccttctcacagggaaaagtcgtgaggactgggactctgggtaagcgtgggaagaggaagggcccagcagctggcccctgctctgtgcccacctaccagggtgcacagaaggtgccttttccgccgagactgcgtgatgggaaaacagacaggggagcctatgtgtgtcccgtgggatgggagattcagaagcaacttaagaaatttttgtaaagaactttgaaactgatgaacagtggtgtttttttattttttattttaacttgaaaacaaagttttgatggtatctgcaaacttcagctgtgcaaaagcagtgcctcttcacgccgaagcagtttgcctttaaggagctgccaataaaaaagctaatggcgtgtggcccagcgcacccgaggtgtctgcgctgtgcctctcctgttcctgtttcctgttcccctgtgtcttccactttctttcccagttcctcagatctgttgttgtgctctctggcatcccctgaagcctttctcagccttccaggtggtgttcgggactaaggaagctgctgacttgaccaggtcttacttgctgttgctagtgtagcagtttattagcttgtcccaagaccggtctgtatcaggagtccacagattgtggcccgctctggcccactacctgtttttgtaaataaggttttactggaacatcaccactcccatctgtgtgtgtggctgctttgggggctacagtggcaggattgagcaatcgtgatagagactgtttgccccaaatgcctgaactatttcctatctggcccttgacaaaaagcgtgcctgcccacatctgcacggacagtggcccgtgcgtcgcctgtagggaataacacacgcctcccggacagccaaatgaaaatgcacacagtggctctcacagagatcagacgcgcagtaaatgtggagaagtctgcagaggtctcttgcagatttgtaggtgatagaactttatatgtgtgaatttaagaaagccggttttgaccattagggtaacattgttacataaatgtgctttttcttaaatatttgagagactgtgtagcagagtgtgtcatgcttggactctaagctacactccaggatgcctgggctcagaccttagtcctccagttgtgagccacgtgaccatgggacatttgttgttattcacagccccgtgccttaggctcctcgtcttcagcatgaggattataataatgtgtacctcctaggcttgatctggggattaagtgagttaacacaaagaacttggaactgagcttagcacatagtaaatgttaagtgtttgcttttattgcagttattaatccaatcctacctctgctggaaatccttgagaagctcctccttatggacaggataaatctcaaacttagaagcctggtacacaaggccctgccagacccagcctctcccctctatccccccgtcagccacacacagcgccccagtggctgtcccaagtcagtctgcccttgccattaagccggtgtccccagcctctcagccataagtgccctttcccctcttctgccacagtccccagccaacaatgaaacccccatcaagtggcaccaacaattttgatactttacatccattatatggtttaatcctgagaacacctcttcatgtggacagtgttaggattatctgttttacagagaagagaatgaaacaagaaaagatgcaagcaactcccctaaggtcctacaggcaggcagtgcagaggctcacccagctgcaggctctcccagcccctgaagccagctcctgagggttcagctccagaagtgctcattcagaggactctccaccaacccccaccaaggggaccctcaagccctcagcccccatcagactcactctcccttctctcttgcacttttcacattgcatgctttgttttgcttttatcctttttcttgttttcacccttgctgctttactgcacacacacacacatgcatacccatacgtgcacgtgcatgcacacacacacacatacccatgtagatgtgagcttctcgagtgcaagaactggattgtatttagctttacgtcacctgtgcctagaacagcttctggaatgtagtaagtgtatagttatgttacatggatggagaaaggcttccaaaaaatagtaaggactgattgggaaacactaatccatattccacacacacttgtctttcgcatttatgtaatttcaacattcagttatcaggaggcagcacattttattggtcaaatacatgggtccccgagccagtttgcttgagcttcagtactaatcttctagctcttgatttttctcatttgtaaatggagtcctggggtatctatatttcatgtggttattggaagaaatgaatgaattcattggtgcaaagcacttaaccaagtgcccagcacacactgtggttcagcagctgttatgattgaagtagtatcatgtgtacctttgatttacttgaatctatctacacacaatcaaaaggtgtgaaaggaaagggaaaacaactgccatccctcacccccgcctccggccctgccctccgtccctcacctccgaccctgccgtccgtcccccaccccagcctccgaccctgcccgccagccctcacccccgcctccgaccctgccctccgtccctcacctccgcctccgaccctgacctccgtccctcacccccgcctccggccctgcccgccagccctcacccccgcctccgaccctgccatccgtccctcacctccgcctccgaccctgacctccgtccctcacccccgcctccggccctgacctccgtccctcacctccgcctccgaccctgacctccgtccctcacccccgcctccggccctgacctccgtccctcacctccgcctccgaccctgccctccgtccctcacctccgcctccggccctgcccgccgtcccccacccccgcctccgaccctgccctccgtcccccaccccagcctccgaccctgcccgccagccctcacccccgcctccgaccctgccctccgtccctcacccccgcctccgaccctgccctccgtccctcacctccgcctccgaccctgccctccgtccctcacctccgcctccggccctgccctccgtccctcacctccgcctccggccctgcccgccgtcccccacccccgcctccggccctgcccgccagccctcacccccttctccgaccctgccctccgtccctcacctccgcctccgaccctgcccgcccgccctcaccctcgcctttgaccctgcccgccagctctcctgctgccgtgtgccgtgcttgtgctgggacagttttccgagatgtggcagccagcacaaaccagctgctcgatctggtactcaagcaaaaaaagaaagaaagaaagaaaaatattattcccaacttagaggaaaactggggctcatgtcaggttcccgcgtgacaccttcctgtggggttttaaaggatgattttgaccatatgtgcatgtcgtcttacacgttgtctttttgagccctttcacatgactgttgaaggtagcagtgatctagtggtgtgatctcaagagtggtgctcaccattttggttaaaatataagaatatgtggtgttgaatggattgaggcagcactcggtgtcccttgcctattcatagggtttgttttttgtttttttgtttgtttctttttatgaccagcctgaatttctcttcatcagtgcagtggtcctctggggctgtctgtatttgagtcactctctgagggcctgggagtgtgcagagagagcatgtttgagactggcagctgcaccagcagcaacaggaagggcctataacggtcatgactaatactccgtgctgatcgcattgttggacaaaaagtatttccagtgaatgttgtcacaagtttaaataaaaggctttactttgtgtttgctttttgtttaggtaactactccagacccccagcgtatagtggggtgcccagtgcaagctacagcggcccagggcccggtatgggtatcagtgccaacaaccagatgcatggacaagggccaagccagccatgtggtgctgtgcccctgggacgaatgccatcagctgggatgcagaacagaccatttcctggaaatatgagcagcatgacccccagttctcctggcatgtctcagcagggagggccaggaatggggccgccaatgccaactgtgaaccgtaaggcacaggaggcagccgcagcagtgatgcaggctgctgcgaactcagcacaaagcaggtacgccacccaggagcacgccccgggcaggtacgctgtgtgtctacccgtgaccacgtgactgcgcacatagctgcattgttccctggggtcacacagagcagtagaatgtcactgtgcttggccgttctttttgtgttaaatatattctgtagcatcgaggtcagagaactaagtgacaaaccatgttttatgatacatgaggaaggaatgtgagcggtgagcacatcagtcgtgggaggtgatttgaaatgcctgtgaatagtcattgcagcagcaaaccagatctggttgcacagggaagtgtctgcgtggtaccaattgaagcagtgacttttaagcaggaaatacgcttaggaacgatttaaaatctaaaacattcaaaaggaacacactccccacctttttttcaccctaccacaagaatcttcctaaaatacaaacttcgtatgtatacatacgtgtattgtgtgtttgtctaaatgtatatgtgtgagatttatatacttgacattcttatgttatattttatttttccaggcatatctatctgtccaaaccaaaatgtggtttaaaaagcaaatataatattttagaaagtttgagttgataaaaggctttagctacaattacttactcatttttaatcccgacttaaaaattaattttgaagtaaatacttgacctggataaaaataacataattaaaaatttataaggcaaaggtgaatatgttttaaaagcacatgtaaatatgttttaaagcaacatactttgaaagatgtgtatcttaatgatatcttcagaagcaaagtagaagattccgatttttgtcaaagggaagcaaaagctaaggtgtgtgtgcgtgtgtgcatgtgtgtgcgtgtgtttttaaatgtgtcttttgttacttttcctctgaagctgctatctggggaatgtgggacccctccagtcttattgttttttccaaataataataaatttcccttgaggaaataaaatgaaaatcaatcattatctttctttctgtctccacattacaattacttaaaatcttctgaactccagcagtctagccctctgccgaacctacacaggctttagggaatatttttgtaaacctgtctgtgaaaactggtttggctgttgaaattgaagttctaattcaagtttaaatgaattgtccattgttgcaactcataaagcgcaagttattttctttttttaagtagaaagtatttgattgcatttggcacgcagcctttggagggacctcagaagatagccacagagagccaggcctgattttgtgtggttacaaagctacgcgtgccccctctctgagtcagtgtttatgtcatcctgtagcaatcaatatataaatacacatccatgcattgccattttccgtttctaatgcgtagaccattccaaagccttgccttcaacttactgcccattttagctcaccaggagtttaaatgggggctgtatatcttcttgtttgcttttaccaaagtcaaagctatactttaaaatggtaaatggagattagaattgagaatattacttttctctgcctgtccccaccctttcgttggaggcattttctgtaccccccacccctcaggcagcggcaggatgcagggtattcaacttgcctccatggtctgtaagccccgcacctatgtgtgggggtgacagatatacagggctcatgcttgtgcatcagaacaaatcccaagaagctgttcttctgttccactttaggccaccatacattaggtcgcctgcttatcccagccagtctggggctggcggacgccccatgttttcttcccagcaccccaactatggcaactctcaggctcccatggtgcaccagcctgaccagtacgggtaggtagcaacacaccccgacttgctgcgggacctgggcgttttctctgaaactgttaacgatcgtgccgtctggccgcgaaaggaacacccaaaccaagaaagcgaaacacctaacagaaaatccatctccaagggggttgtccttctgtccatttttgttggtgtgtttgtttcgttttcctttcgtattaacagtactgtggccgttcggtggaaacccgcatgcgtcctcaggccctgtctgtgcatggctttcggcatggctgctttccttcatgcctgagagggaaatagaaactttgatctgtgtcgaagacatgatgtcaccacctctggcgtcatttcccccattgttgtcattgttttgtctaggaacctgtgttgtgcagcgctgttctcatgactatattatcactcctgctgctacagtgagcggctgccatacccacccccaaattaagagcacagcatctcatttgacaagagactcactgcagttgagctgacaggctattcataggacttaggaggagtttcattatatcaccaccaagcaaatgtctgtgccaaaaacttctattattttttctccagcgagtatcagaatattgaagtcaccaggaaaatacaacaaaataatccaacagataattttctgtctaaacacagtgttgccatattattctcaatttcaacacaggaattacatacagcaacaaaaagtatctcttctttcctactacaaaactgtgtaatatcaggttctgtcaccatgtttaggttagtaaatgctcttaaagtctattactattgagtgaattgctaaaaaaaataattattgctatcatcctgggcagacttaatcatgtttggtagttagttttagtagagacatgccccatctttggttaaaatcaaacagggaactatcacctagctttgtttaaacagtaaacttatagaactatgctttcactactggttatgaatgcctgacagagctttttagtagttttatattcagtttacatttatttagacagaacaaatgataattttggaatcgagagttctaaagtctgtaaacatggccctaaatgtggaccaacaaatatagaatcctgtaaacatcatccccaaagtgaaataacaaatatagaatgaggtaaacatggttattcttgggaaattggcttttcctctttcttactttcttgtggtaccttcaaggtcaattcatgagtcagtaggaagataacagtcggaggaagcaagcattcatcatctgcagctaatccataggatctgtccttttaccaactccagaggcctctttagacccacaaagctagtttgactgtgccttgccaaaccacattaagcagctgtgtaaaatgaatttaaatggcatgcatcagagtgaaatctcttccactggggcagaaaatcgatgttagctaaccagcacgaggagatcaaatctgtatttcagccagcagcatccagatagcttccttagagtacaacacctcctccttaattaaaaataagaaaaagaaaaatgttggcgttattctatgtaaatcttataaagcacacttggcaagggctcatattcatagccccatgactgttagctgtgaattttaacttttatgtctacactattctttctaaaaaaagaaagaagttaagttttatttctattttaaatcttccttctgttcacttcgcaatgcacataacctgtgttgtgccttttttaaaagcagaagcttgaatctgagaaaacatgtgtatgacatgttttagtgctctgggttgagaaatctgattttcaacatgcttttgctttacttatttaacagcttgttgcagcaaactcgtggttttgctttgatttttgttcccccattgatggctctgttaggttgaagttaggttggcgattagaaaagctagtttgctaaatgttagtttctctttgggagaggaagaaatggcatagtgtgggattcacagagcttgtcagaatgacttctttctcaaggcacaatcccaaaggacctagagcccatggaagaatctgaaaaggacaaattaatgatgaaggtggagcgtgagtgagtgtgtgtctgcaattagataaaaacagaatgctcattgtaaaaatgaaggattggggcaattatgcttcagattttctcagctggtcaagtataagatagtagagagaaaaaacatgcaagtttaactggttagaaactgttttattaatttctttgagagtgacaatatgaaggtaaaatcgacctgctgcattgaataaattaagaaacatagattaattttttttctttttcaccttttgagtaaattcctcattttgatcatcagaggatttacaatagaatctggtgaatcttcttgttcacgtactagattcactgtgcagtaatatccagtcatttgaagttaatggtttataagtaatatctgtacagaaccctcctccttctacacactgataccctttttatctgaaaatgcattgttgtgtacagttttaaagcattgctagttaaggaatttacttttgaagatataagaaacagagagttggaaatactagctgatcttactaaaagcctacttcaggaatggcaaattagttccatccatctgtagatcagttctcgtggctctctgtagcatcattttggaggattctgagccattacctgagcataggtgagccaaagtttgccagaagcttaggaagaactttggcctaccacttcctaaagagcatagctgtggatcccaggctaaacacaggctttaatatagctcactacaacctcaaattcctgggctcaagcaattctcccacctcagcctcccaagtagttggtactacaggcacgtgccaccatacctggctgattttatctttacttttttgtagagacagagtctcactatgttgcccaggctggtcatgaactcctagcctcaagcaatcctctcttctcagcctcccaaagtgctgggattacaggcgtgagccaccactcctgaccttgtaacattttttaaatgactgaatccattatgtttaaaggctgtgcgtgcagatgtgcacaggtagaataactttcccccattcattccatgtgtcttacgtccttttattagtcctagatggtacctggtgatgtccagcaattgacagctcttcaaaatacaactgattgtggatttggaaatttcagcattatccagaattttttcttggaaatgagctctaggaggaagcatgatttcactgaatttacagaagatctcacaagccctggatctttaagccagggtagatggacaaacagattttaattccttaaggcctgctaccctagcacctcacatatataaattttgatcaagtcttgagtgacttgagattgtgtcaaaattctggcagggatctttaagctaatactgtgttcataagaagaggttccataaggacacagagtttcaattatagaatgagcagatctcagaactgggaaggttttagacgttacccagcctctatttcttgattttatggtggagtcaacaaagacctacagggtcacccactcagaatcattgagtcaggagcagggtccttgtcatctggtcctgttgttgttctgctcttctgtttttttttttgttttttttttttttttttgagttggagtctcactctgtcgccaggctggagtgcagttgcacaatatcggctcactgcaacctccgcctcctggttcaagtgattctcctgcctcagcctcccgagtagctgggactacaggcacctgccaccatgcctggctaatttttgtatttttttttagtagagacgggctttcaccaatttggccaggatggccttgatctcttaacgtcgtgatccacccgcctcggcctcccaaagtgctgggattacaggcatgagctactgcgcccggcctgttgctcttctttctacttttttgttttgttttgttttgttttgttacacaacacctcttcatttttgttctccatcatatctagtggcaatcctgctcctagaaaccaaatagtaacgagtatcttcgtggatcttccacctcttgcattgaaatctggattttttttctcttatctgaatttcgttacctctgctgcacctaaaaggaaatacatgctttgcacattcccatgtagactccacgtgcagctcagagttagattgtttccagagccaagcgctttgtgagataagtaacagttacttactggcacaagggcgggtttgagtttctgtccttttcaccatttgaggcttttaccaacactgctttggcatttaacattgttgggactggagtatggctgttaaagtacgaattgtgaattgtgaattgtgggggagcagagtgggaaggtagtgatattgacacggataaaggtgcacacctacatgatgctggtataagcactactgttcctttgctgtccctgagagagcccttcgtggactaactgagcatcagaagaaggagaagtctcagacttcttaatttcaaaaaaaaaaaaagggtaaaatgaattaatttgaaaagtcttgttactcttgactagaagggaagttttaatactgaatatcacaaatataattctgtagacctgcattttaatactacatcataccaaaaactagggtcactgaaattagctttcaaatgttttgtgttgagtccattaggaaattgggaactttagttaagattattaaatcttagccactcattaacagggtgaataaattccatagggtagctagatcagtggtaaccccaccgtattgctgttggaggagctgaatattttgggagagaatgtgactagctgccttcctctgcttggaagaagctgggtctatttacaaatgcaaatgaattggactggcttgttgggtatacagtggcttgtactgtggctcatgtgcaccccacatagacacatcttccagccactgttctttattgaggtgtatctataattcatatcctgtgttgccatttgccagcaaggcactttttctgtgttattttcctctgaagccagtatgatgcaattctgctgatggacgaagagctgctgatgtggaaatacgttaatggagatagtgcattaaaatgtcaaagagaaggggcaaaaaacttcgaaatgtgtcaagccccagttgtagtggggtccatgtgctaaagagcaggaagtgatttgtattaaccaagaatccagccctttggattttggacaattaggttttaacataatagctatgatttgaaaagtcatgttattgaaagacaaagagaaaagatttcaaagccttaaacagattttttatttctgcaattaaatgtaagcctttgcattatcatctaaatactacgctttaatttttagccccttttttctcttcaaaatttagaatttgaatgaatgttattatgttagtatttaaagattatgatttcaattaaaacttttagaattacagaactattatggaagccataaagtgcatttataaatcatcaaatcaaaaagtagtaaaacactaattctaaaaggatcagagatttattttttaatgttaatgagagccaaggaatcacagcatgaactgtgcagcagacctgggagggaccggagaccatgaggtgccccaagccactcgtgagcgtcacccagagattttcgacagccgctgtacaccctcacccagccagggggccaaggcgcgggagcctcaactccaaaatcccctggtggttctggtgtggaagccagctcaggtctgaggggggcctcagagataaccgccactgcagagcacggaggcagcatggagtgggaggtttgggaggcatgctccggacgcttcctccttatgcagtcttcctgagggacatcacgtgaggagcacacagggctcgcactgggagcactctggcatcagaagctcgagtctgcgccgacctgaccctgactcaggctctggagatctgttgatcatggcagagtgtgtcttcctaaatgctttgtcttgatttctgcccttttgcttcctctcagacctcagtatcctcctcatcccctgaaatactcagttccccaccacacctagcctgccctcttcattcggatattcccctctccgggtctgggtctggccctctcacagctggtggctgtgctcactcggagatggctcaccgtgactcgcgcaccactgtctatgccacctgtcttcacttccagcttcatggctctgttaacatcccgcccccatagatacacacttacaccagatgtcctgggatcgtcacagcgagaaccagcattaaagcgcacccatcactaggcgtcattagcagcccagcccagcaacccccacggttctgagttacgaaaggcagggatctttggaattacgtgtgtgcaacaggagtggcaatggccagtgatgccaacctgccaggtgtcaggctgatgaccagcaggtggtgaatttttcaccgccctgaaatctgataacctcaacagtgttttgggctgaaggcagcaggaagtttgtaagtggtgaagaggctatgactatgtcttagtatattgcagcttggggtttggaaagtgtcgtgggtcacagggcatcttagtagcagtaaggagtatgagaagcaactcactaagatgctaagattcctcttaatcttggtcttcattcttattttgaactccatttctgccattatatagatttaaaaaaccaaacaggccgggcacagtggctcacgcccgtaatcccagtactttgggctgccaaggtaggagaattgcttgaggccaggagttcacaagcagcctgggcaacgtagtgagccagtctttacagaaagtgaaaaacagtgagctaggcatggtagcgcacacctctagttccaggtactcaggaggctgaggtgggaggatcacttgagcccagaagttcaaggttgtggtgagcgaggatcgtgccagtgcactctggcctggagtaaaacagtaagaccctgtctcttaaaaaataataataataacaaaaaatgcacagacagaaacctgtaagattgtggcccttgttttaaaagtgaactcatactggattacttttgattgttaaaattcctgccaggtaagaacctgtctgaatcctgtcctgcacagagtggctggtgaggacataaagaactatagctttgctcagcttgcaagccttgcctaaattttaaccctaactgaacaatgtttggctttaccaaactaagtcactttgtggcccaggccaccgttaactcaggaaatctccaagaatttttaggaggattttttaaagatcagaaattactgtttttctgtttcctggacaagtgcattttttattagaggtttctacacaatattgctgcaacacagtgatataggatggagaactcaggacccagattaattttcttaagcccactgacaagcccattaaggcatgagagttagatagaacgcatgtaagatagatgtgtgcttccccctcgcactgctaaaactcaggttcgtccatcagggattgttacctactctgagtattgctgggctgataagctctctgtgtctgaggctgtgtggctccagacctctaagagacctgctccctccactctgcttctgtggctcctcggcagctaagccactttgggattagcagttcactcccctttataccttgtgaccttggaagggatgtcctggaataaaggatgtggctattcctagcactgagaagtaatagccctccttggaaataacagagatcttttcttaatggtactatgatctcaagataaactttttaagtaaagatccttaagtagaatgcaatagaggtgacactttctctctgtgggtgacatccatggcagctaatgtttctttcatgctgtatggatctagcttcaccagaccaggaaactgtgccatttacatcttctcagaggtcagtgggatgcgacatgataccaaacccccaaagttctggagagtcatccattgcagggaaaagacaggatttaggacccactgctacccccctgtggctctaatccacactgtgcgcttgaggcagcccatgtgctggggatcagcagggaaaagctgaaatcagaatctctgaactaaataccttcacagtattgaggttcatttttgtatggttgccaggaaagagtccgtagtagcagaacaatgggcttaacaaaccaaaatcaactttgaggatgaagagaacttccttagttatcagttgctaaaattcaagcaaccagacaacaccatgtttgcattttcttcacaccccgacaaggaggcctctcgcctcagaacccctgagctctatttgttctcctggttgctttgagagaaaaggtgaagatcagtgagctgctttaggaacaactaaagctggttacctgcattgaagcaaaaaggaagagctgaatcttgaaattgcacaacaggtgccatttcagcagggagtgccaggagcagagctggtaacaggtcggaaccttctgagaagtctgtgtgaagtatgaacaaaagggaaaaacgtttctgatgttagaggcttttaagaaatccagactggaatatgcagtattcctcagtgcttagcaagaagagcttcaccaagatgcaggagtgaaaaatacagctctttggagaaatgtggagacaatcaggagaaatgctttgaaaacaagaggccctgtgggcagtgccacattttaaaggaccaggcaaagacgtgccagggagaagttctattctgaagagctaaggcatagccactgaaaatattattcttgagagtatggtgacaaagttactactgttcctttacttagaagttctctttcataaagctgtcgcaaaacaatattcttctttgcccattcttaaaggaagaaaataaaatgtaaacatatcagctaccaaaggttttggggagttattaacagggagctggaagataactggtagctgctccagcttgtctgctagcactgaatacatggaagctttctttgagtgagcaggctgcctcgaaaacaggtcacattcgccagtggaggaagacttagacaagactcacaaagtcttatatagagggttcctgcatagggaggaaagatgaccccaaacctctgcttcctgacctgagagtccacctgcctgtgtgacgctaggtgctcagaggcctgtccaaagccaaaccctgtccacatgtccaaaactaagcccacgctttcccctgatgttctttatttcagtgactgctccattatctgcccatcccacaagctggacacctaggagacagctaggcacaacttttcttttccccagaggacctaattcatcaccaaatcctgtccgtttcacctccacgatattgctcaactctctcttgtgctccaccacctgttccagggcaccatcatttcttccttggttgtggtaacagcctcgtaacggtcagccccacattcgttcttcttgcctccgatgtgttcttcccagcatggccagagaacaatgtctttaaaataaacatattttaatgccattgctcctgcttaaaaaccccaagtgtcttcctgtttctcttaggataaagaccaaacccagagaaccataagcctggccccgcaccactctcgcttcttattttgctctaccgcattttctcctggagagggcctcctggatgccccagggcccttgaatttgctgtttctcttttctcttctccttacctggttaattccagtggattgatccctcagatctgagagatggaggggacgtcatcccttccttgggaccttttcctgtgctcgccttcctgtgagctcacataacacacagacctctccaagccacgcatgtggtcgcaacttcgcactcgctgccctggttgtttgactttggttgtgtttgtttttagtcttggcccgctgttgtgctcattcctctcccatacttatcttaaaatactcatcttggacaagtgattataactgtcaacaaagcagtaggtatttctggttaattgtaattacttatagcatgtctccctgagcaaaaggggtagaatctattttttttagtagcatatggttatatacttttacacgaatctacatttttaaataaaggcacttctattctatgtcttttgtctaatgagacaaatgccactttaccgccacaggattgattcctagccagagccactggcttgttgaaattacattattttgccaccagaattgctaatgcagctgttgttgcaggcacgctggtggattagccacaccaaaaattgaccagggcttgacggtcttattttctgttttgattgtgtgtgtgtatatatatatatatatatatattttggcgggggggcacatagtagttttccctcttaaaatattaaatttaaaataacctcgactgagtctctccttctcagtactgctttggaagagtcaccatgtaattcgggttgaaaatctgtttcaccagtgatgctagatacatgtgtgagaagagtttgtgtttataaaacattttttatagggcatcctgtgtaatgttaatgtatgcaattggatctctccagaggaataaagtaacacatttagaaataaactgctggaattggagcatttcaaggttttgagtactggttctgatgactcttgggtttaagtgataaagtgccccaagttttagtgttagcctagtttatgttgttagtaagcagtcttttctggcttcataacccagctacatctacagtgacagtccgtatagagaaagttatgtacacctggcactcgcactcattttcccaataaagtgtgcactgcgtgatgctcattccgaacataactcaagggtggtatttgcagtggatgtgctggagcttcccccgtgtctgccactgggatgggactttaaagtggcttcactcacagggtctccatttcttctgtctgtccctacccttctccaaagaactgtatcagaaacccattcattttaaagataaccacacacttcaccgtctgtcactgttgagaaaatacagtgttgattgctaagatgataaggcctaaatattcttctctaaagcatcaaaattattttaaattttaatgtagttgactttaaaaccagatatttagaaagatgtgggtactgcatgaaatttcatactaatatttttaactgctgaaagcaaactgtagtgggaagtgatattcctctttctgttttcacactgaaccattggaaatagtcgcttgaaaactggtgtttgctttgggcttttttccccaaagacagccctttgttgggatatgaatatgtaatgtttgagaaatctccaaagtgaataaaaggaaaaagtaaaaaagttgttggggtatgtatgtgtgcagcccgtgggcaggaatgaggagtgctgtagggaaaactcacaggtcctgctttctcaattattctccctgtaataacctggctttgcttatagaatgacagttcttaaatacctctggtcccaaccagatttaaataaagttcttctggttattccgcaggtcagcatgtttaagtaataactccccaatttgaacattgccatttaagaggaggagggagcggtgctgtggtctaaccctggcccaggcgagcgcagtgtcggcatcctggggtctggggtcaacaccacccaaccagggtcacccccacagtgtgcatctaccgaattattgtaaatgtttgtctccttacccccctgagatgttcctaggcagtcatttctacagccatggactcggcatctgcagagtcaggacagctgtcctttgtaacagacatgaagcccgcaggccccctggaagccagagcccaagggtctggggggaggctttgcttttccgggtacagcttaggtttctgtagggtttcacattggaaacattctgctcgtttcaattcatgtttttgcctgtttttgttttgttgcttttcaaaaaagcaactgatttacttcttaacactcctaattcatttggagccgtccaaatgttgtgttggtcagaaggggctcagcagccagggagcgctgctctggaaaggacccagctgctgctgaggtcgcctcgaaacccaggtcgctgtggtctcgggcattgtattttcagccccaccaaacaaggagctttttgttgtgagccacagactcctcctaggttagcaacaccacgctgagcaggagtgctgggttagttagggcggcagccatcttaggagtccatccacagcccgctgtctccactaaccaaaatcagtggcgtgcagtgcgagccttcttttggtatcaggcccatgttgcttgttcaaaattaccaagactcttggcagtagtgtctcaagcaagagcaaataggatttcctctgcaatggtgaaagactggctctccccacccagacaggcacccactgctctgccctggccacgtgtggcctgtgctcctgggaggactcacttcctgccctggaggcccagtaggcctgcagcaggtgtccagggagctgttgtattcatgtctcccactacccctcactgtggccagctccctgaagcctgtattccaggactcccggagagtttacaccctctggtttgtcatctttgtacaaccgcagggccatacaccagacagatggaaaggcatggtgcagcaggctgccaggagccaggcacttggtctcactgagtgttagcagtgttagagtcccatagagaaagaagtgtagtataccgcactgatagtaggtttggggaattctatttctgctacttactagctgtgtgactttaggcaagttacttaacctttctgatctttattgcctttattaatatatgagcataattccacctaccttcctccaggaatctaaaacattaaatgtgtatgcctagaatgtgcaccaggcatgcagtaaatactaaataaattactgtcactatcattaccagcccctccctgttctggtgtaaaaaactgaaatccaaaggaccagagctcccagagctccagtgacagagtcaagacccctggctttttaaccaaacttttaaaactacagatgtgctttaattaaggaccattgtaaccagcaactgacatccaaggcatggacctcattgttagtttaaaggtatttcttaaaacctgtagtgtgtgccttcatcatcttctggtgattaaagatggacacggatggacagtgctgtcctgggggagaaatcctagatgagggttggatgattacttcattcagtcatttgcctggtggattttctattctgattctcttttttaccttagtataaacaagtgtctcaaggaaccattagtttcatacatgttagttacactatatatgagacggaatttaatggaagcttgaaaaggcgaccatctttgtaatgccttttttcaagaataaaaatgttctgtagtaattcatccctttaacaattttttttcttttttttagtaattctcatgtgcaagggattaattaggcccagatcctcctctcaggaggcttccatacctagaagaaccaagacatgcgtaaattattttaacatacaaaagaaagaggtcagtgctacaaaaggcatagatgaagctaagtggagaggcagggcttactttcaggaaggatgacaaggacagccatcacagagcagtggccactaaaatgcatcttggagaatgggccaaaattggctgtgacttggaggcagtcactgacatggaagtagccttccagaaaacataaccgtccacaagtgaagatgctcttcagtgattgtctgctaagacactgagagcagtcccatcaggcgccacttttgaagcagttacctaaatgctcaattgtcccttgtttgaagaacacctcagaagggatacttctaaggtacttgagttaatgccaacactctgcaagatgatgtaaagccctgaaccatatagggatgtgtttatagctactgtgcaattgtgtgcatgagtatgtgatgacctagaggttaatcagaagctgttggatgatctcagatctgttcttaatgaactccaaggggtattctaattctgatttagcagtctgcagttattcaaagtggactgtcaggaagctaagaattgcaggctaaagtaatgcccatttctccctgagccaccctcatacctaagaatctttcagcttctaacagtgttctttccaagccatcatggtacattagattgtacagaatttctctagtttgtctaatatttaaagtagaccagttatggctttgatagcttgattttgcagatggtccacgtttgaactttttgtacagaggtttttcagttgagtccgctgaaaataggtaaacaaaaggaacagtatatttaaaaaaaaaaatgatttatggaccagacatggtggctcacacctgtaatcccagcactttgggtgggcatatcgctttgagcttaggagttcgagactggcctgggcaacatggcaaaaccccgtctctacaaaaatacaaaaattagctggatgctgttggctcacacctgtagttccagctatttgggagagtgaggcgggagagtcgcttgagcctgggaaagcagaggttgcagtgagccaagactgcgccactgcacttcagcctgggcgacagaatgagaccctgtctcaaaaaaacataaaaataaaaaaataagatttatgttaatcttttaaaggatctcattttaaaatgccaactattataccaagtgatagcttaatggtggtggagggggttgtaattaatttggaacagataggcagggtgtctttggatttgtacccctctactagcttgtactcctaagatgaaacatgagtagccaaaactttgaaaaattttttaaaggtatgctctttacgtaagaagagcttgactacaatggtggactcttttgacgcttttgccaccttgctatcatttctgtttttagggcaatctctacaccactgtgcagttaaaatctctcccccatctcgttactaacagtcagagaattgacattgtgtgacagttatctgcttcaaatcagagaatactcttgacctctttgcaagagtgaagagaagtctgacagggcgtaagacaaaactaacaagactaagtcaccaagaccgccttgtaggtctgcaccaccctggggacgggcgactgcatgctagggacacgtgcagctgatctaagtgcccatcctcctctgtaacgtaaaaagcccaaccaacaagaagtggaagtctgatgtctactgtggcattttaatgtagggaaattggtatgtttttaatagaacctaattaccaaagttaaagagtagggtcggggagagttttggaagtgctttctcccatattcattatatcagaaaatttaggtcaaagaagtttttttaaaaaacattcccacactgcccatttgtttttcatttcttaacctttgggtttttatgtgaggttactaagtagtgttaatagtcagaagttaattttgcttgcttttgtaattcctgttcttatttcaagttccccctttcttgcttatattcctctatataaataataacctggaacacttgacatgattaaaaatgtgtaatttacttgcagaacttgtaatatttggaattgtaaaggggtgtattaaagagttacctagcaatagaattcagcctttctctccaggaaataatctgttttacacaaacatgaaaagttatagccccaccccttacataaatgcattagtagaaatgactgccagggcaaaccactgctaatgtgcatggtcggtatatgtgtgctgtgctttctcttcctgtaggcaaggcagtttccccggcatgaaccagagtggacttatggcttccagctctccctacagccagcccatgaacaacagctctagcctgatgaacacgcaggcgccgccctacagcatggcgcccgccatggtgaacagctcggcaggtaaccttggcagctctgcgctcctgagcccctctctctcccctctcctcctcttaggctccaccagtgaatctgcctaaacggcccgagaaggtggatcagttggcgaaagtgggaatcatactacttttctgcttctcagaaacttgctccatctatttaagacttgagaattacattatattttatgtaaattatttttattcaatctgtgtttgtataacaagtggacatatttcaagtattattggagattgttaaatatgcacactaagttctctttctctttgggaattattagtattggaagatcctcaaattctctccatttggtagtggtggagacaaacatttcgaattcacatttcaggggaaatcgctggaagggcagagcaaggggggtttgaagtactttttacatttagggaaacacctctaaatgtatgctcggaagtagctgcttcataaatgctctgtgcagattgtctctattgggaaactgttttaaatgtttcatgatgtttagttattttaacccattttataatctccacagtagcgttcttaaaagtcatgcctgatgattgcagtggatgagtagccaatgtgtggaaaatatcaagagtgtctgagactgtgcatatctcccatgatcttagactcttcaagacccttgaaccccctcctcaggttccgtaactacctaaagacaatgagtaccactttttacataaagtgatgtgtatttccagcgacctgttactctctgtcacatgttaaaatggatctcacgggaggattccctccttcagagactgcagggcgtggcttagccagtgtgtatcccgtgatgccccgtgatgcgttaggaatgcatgggacagccagatccttggttctttctgattacattttttcatttcttctgccttccacctcctttctggcctctctgtctttgaaagttcatgtccctgtgtccggcggaacagccagtgagaggctgggctcgcctcctgtctgagcttctgcgtcgttgatttctaggacctaattgaagggtgacattccatgataatttctcttgaaagatttatgaaagaggaacacatagaaactagtggtaaaaatgaaggtttttaaataaataaaatagcccttcctgatgctgcgttgagtgcttctccatcacagtttggtggatgttttacattcgagatgaaagtgaaaagcttgcaaacagcctgttagctggaagcctcttctttccctaatttccctaaccagtgctggcccaggtaacagaatattgggttgtgacatactatgttttgtctgacttgctggaataaaattacttgagagcattgaaaccacacaatcagttttcacctaatatcagcagcgctcattttccccgtcttcctttggaccccagagccacagaaacaaccaacaacaagcagatggcccagtgccctgcctcagaagatttatgtattcctaaggaatagccagcttaatggagattcacagagagggtttctttctattcttattattcagataattcagctattcgttattccgtacagaggaaatctgttcagtgaaaggccgtccatcctcacgatcttttgtatggggtggtagtgtatttttttactgcattgtacattttgaaacattgaatttttaataatttaaacatttatccagttttcctctacacgttgatctgattttatcccaccttgattaagtgaaatgcataacagaggaggactggccatttcacattggctgtgcacctagcagcaggtacacgtgaatctgctgttactgcgttctgatctctcagagagacaggagtgacgcagagcgttacagcacagcccctgtgagcgttgggatgcgtctacctgactgcacaagagaagggccagaaatggtgggatcaccatcactccagtctccttggtttgggcccatggagataaattaccagtgataacagcaaagcatttctccatcaaaatatacttttggagaaagcgaggacagcacaaatgatggccaggtctggtggtggaattttctgaacctcagcagccagtgcaaccagcattccagcaattctcttcaccgagttcaaacaactgtgttgtagacagtgtacggggccaaaaaaaaatcctcctgtgtagtgacaaattgttacaggcttcagtgagcaagtaattatttaaatggagtcagtgtgagtataaatgtgacaactatttcttcacttaaaatgccaagggaaggaggatggtaagcagtgggaatttttccttctaaagagcttttttggttttgttttgtttcaattatttagattaaaaggttagaattatgtattactgtggacaaaattacaaatcactgtaatacaatacatgtgtgattggttaggttttacttatttgtgttgaattttataatattcattagtcatttgcacttgtctgcatataaaccgtcatcttaaagtggacatctaaattccaaaaactttatctcccatctgtggttctaagtttgcctcaccagacgctactctacaaaatgtagggcatttctcctactgccacctataaatagcacaggagcggccatatgtgctgctggaaccaggctttctcacagagagccctgggcacattccagaagtgagtccttctgctaacctagcaccactcagtcccaaacatgaagtgtcccgttaatgccctgccagtacagggtatcccagctccagcaggcctttacgaagaaaaaggcaatcacactaccacaaaaactgagaacctcctacctctggacttcctgcagtgcttgttaaaactaccgattctggggctcccttcagaattcttgaggtgggtccaggaatccgcatccctgaccacttccgcaggtagttttcatgcatgcaagctcaagtttgagaagcgccaatgtggaggtattttgctcaacagtctcctggcagatctgctgccagctttgtggggcattagctgtttaccagatgatttgctgttttgaaattgaaaaaaagaaaagattcacaaaactactcctagaatatcaatcttccagctggatcactgttttctgtcttgggacttcagggtctctcacaaaggaaggtttgggtcttcagcctcattgcgaggggctggttgtccgggttgtttgtagaggttgctggggtgctcactttcatgcttgctctaaggtaatgatttcaagtgaattgctgccctcccaccatatacaaaggacttgataaaagggttttgataagttatgaaaaccaaatctcttaaactgggggaaaatagatcctgagattatgccaaagtatgtggatggctccagactctgtaggtggctgggggagctggtttccttggaaagccacccagcatggccagtgtcctgggggtggccacagtggggagggggcgctgatggcaatgatggggtatgcagggcctccagggtactcgctggccccactctgtgccatggagggtcctcccggtcagggctgtcagggccttgcgtatccaatgagagcagtgcgtctcccgagccgttcttagatcctgtgtgtgttaccttcacagtggactttctgtcttggcacatgtaaacatagtcatgaacatccgcggatgtacatagatcagccctctgtgttttcaaaaacaagaaatcaaatattttgcagtctggtatattaccatgaaatgaaaagaactgtgcatttctgacctatttcaccatcttctggaaatgattttgcagacttgtaaggagactgagtaaaggaagaggaagaaagcaggcatgagtgttgaagttcggtttgactcatgtcatgtgttctttacgttccttttgaatatattaaatccagtgtggaatagctgccttaggaccttgacccacacttactttaagaaatcgttctagttcttaaatttcaatggtaaagccagaggctggtgcttgaaaagtatttacagtgctcaggcagcactttctgcagttacagattctttactgcccctttttatgtctgaactttacatactggattactcgtgtcaataggagaaggaacagtgccttgatttaacacgtccttgtaatagtcgtggtccttctcttctgggaaaggagaagaaatagtgcccctggagtcccattgccttgggaggcatatggctcgtttcagtgattccttgagaattctggtaagaagtcaaaaataagcatttaaataaaaagaatagtaaaaaccacagtaaggaaagagcttctgatccatttagtaaaataaaacatacattttataaggtagaaatattaaatagaaccatttattactctaaattctatccttatttatctctcaaaataatagaacagtgccacttttgataatttttctatttgcacacccaaaatgcctgttttaaaatatataatagagaatgaagaaatttggggaatttcagaccaacaatgtgtttatattcatgtaagtctgattttcaaatcagtgtaaattgtcagtaatttccataatacatattggcctagttctgtatgcttacaagttgcgtttgtgtacgctagcacatttaatgcgtaaaatagaatcttactattcctgccttcaaaataatattcatacataatttattgtaaatactgacaaaactaccacttaaaaccattggagaagctcgatgccacagaagccatgtgcccatgactttaccactttctctggaattgttttggctgtcattcctttgaacccgctctgaatcaactagccaggacatgtggactcgcatacataagcccctcttttcgcactcatcctgctcttttatccttctattcttctgaaaagggtgttttttaatgtacaggtttactaattcatatctcgttagaccccagagacaaaactgcgtggaagcagtccagtccactgctttgaacaaggcggtcttcgcggtgtaatatctctcagctgcttgaggtttcacacattcacaaaaataacagcatttttagctgatcccaatagatttttctctgcagctgcatcacttgaaaaagctttttgttccagttcttaaagtctaagtattgaaagtaatttgaaaaaaagaaaaacatcccaattatgatttgtgtgtgttgtgatgacttcaaggactgactgggctgcaaatgggctttgaaaaacaagccaatgcgcccgtggaaaagacgggatttcaaagtgtattgttgagtgtgctgatgtaaactcatgggcacgtggcagggcaggcttttttggcaggacctgtggtctcaacctgcagtgatgctaacgatattagcaaattagcaccacaaagcttgccagctaattcaccagagcctgctcactctctcactgctgtaattaaaactaattattttctaaaacatagtaatacatgaatatgtgcaataatcattttgtagtgggcaatctgcggagccttttttaaagctttttttttttttcttggcacataacgctacatgtgtcccgccttggttgagccagcactttcatttgcagaatgtagaatgggccctgttcatcaaacctcaggtttattttcatttgaaataggcctggtttctggttcttcccactcatgtataaggctcatcattctctcccgtctctctccttccctctcttcctcactctgactcttcacatctggttggtgcctcactcgcagcccctgcagcccagtgttgcgcagatggttttcacagtggggttctgtagaaattcagctgttattccctggatagctacactgattccttactctagtcttgttcttccactaaaaagaaatctaaacccatatttttaacctgaaaatgtctgctgtatctgcaatgaatgtggagaaatcagttgttctatggtgaacctttgatgctaaagcctaaatagaattgattggatttctgagcctagtgctagaaaatgtggtgttgactctggagctgctgtgggcctctgacctgggcattgagctgctgtaagggttgatgaccacaggctctcagacagactgaaaggatcccagcacaactgcaaagtaatcagaaatcctttccttccaaaatttatttttaattatattgtttttgaagccatctgctgtgattgtcttcccttattgttgactagactacgtgcaatagataaggttttcaaaagaaacactgtgaaatgtcaaataattttgcaaactatagattatttgcacttatgaaattgagaaggcactaaatcctctaggacctaggtagaaaatacgcacacccagtatttgcctccaactcctgattagtaatttaaacatttgccttatttccacttgttgcctactcttttgaaggtataataattttgaaaaaataatattgatataagttgaccttcataggtttgggtcttaagcacacagaatgactgcccttttttttagataaaaaaggattttgccagaatgcggtgctgtttgcatttcagaaattaatatgctccccattacaatttcttttttcttttcttccttcaagggaaatgcaagggcctcctgcttcactctgtaacttgtgttggcaggagtacagtctgacgaatcacacatataatcctaaactctttctcctgttttcgattagcatctgtgggtcttgcagatatgatgtctcctggtgaatccaaactgcccctgcctctcaaagcagacggcaaagaagaaggcactccacagcccgagagcaagtcaaaggtacttccttcgcctctgcacgcggtgtgaggtctgcctagcaaaaagctgccatgtcgttctctcttcactggtgttggccgacacttttttttcatttggtctcctctgcatgccttcattttgtgcaacatgtttgtagtcttcttttctttccccagccccttcatggtgtggatctgaaagttactagttcttatggcattaactcacggttgggggagaggggtggagggacaagacccacctaagaaaaatgcttcggggtggggagaagtaggggtcctgcctggtttcggtacttgcagccattttctctgccttcagtttatagcttcctgttttggccgcctcagcaacaacaacatacttaatattttgctttcctgccttatttgataaataaggtgaacagctttttttttttctttctttcataaggggtaacccatgcttagcattccatgtaagcttgaagtaagcatggtggcgtactggccttctccagcatccagcagacttacccaattatactaattaagaatgttgttttaatacctttatctatgtgtggttttgtgtgtttgtttgtacatgtctttatatatatatatatatatataatatatataaaaaaattagtttgttaaagtggatgtactttttgttattttaaataaagtttgccctacctttgtcattttttttttttttattcctctaccacaggatagctacagctctcagggtatttctcagcccccaaccccaggcaacctgccagtcccttccccaatgtcccccagctctgctagcatctcctcatttcatggagatgaaagtgatagcattagcagcccaggctggccaaagactccatcaagccctgtaagtggctctggtttttttttgttttttttgttttttgtttttttggggttttttgataattaattaattctacttgaatgcttgcttgtttatttgttttgtaagactttttcttcattatttatccatgaaagggttttctttataaataataatattagtgacaaaatgaataaagtttgcgtgcatcaaagaagttgatttctggtaatgaaaaagctgttataaagaagcacctctatacaaagcatgcgagtgtgttaactgggtccaaactccttcacacagtgactttttaaaaatgtctgatccattatgcacttatagaagattcttcaaatgcgttacttctccatttatatgggaactaatagcagccattgactgaatgataagtttggcccctgacctgtattttgcatgttctatctatttcaaaactgcctacctgaaagaagtaaatactcaatttgggtatggtttagtgtaacatcagccctgctttatttttaacccatttgtctgaaattaataaaaacgtacaagttgttagtatgtgaatgaatttttagtttaataatgtgtacctatgttagaatcagttgagatagaacaattgtattctgcacaagactgctgataatcttgaaattaagtgttgatttttgtatgatatataaattataacaaaaatgtcacggatgtatcagggaattttgtaagcctcaatgttcttctgaccctagaagtgggcctttagtttcctactaaagaaattctgtaccattagagagaaaaaaaaaatggtgctgaagcaacctttattttacattcatataaagaatcaaaagatcttaaaaaaaaaaaaacaacatgcaattacttgccaagaaggcttaattaacatgctcatttctgtaaggcgatgtattgacgagcacggctcaggaaggcaagttggaggcaagaagaccctagctgtgcagaatctggcaatctagtcaaaaccccaaaaggaggctgctattaattatccattcactggtttaaacagatagagcctgaaggcttgaagagttggttgttctagtaaatgtttgtaaaattcacatgcagctctaggataaccagcattttccctttcagaggaggaaagggcgatattcgctcttaccttctctgtagctacgtttcgattttgcagcacccgtgatgaaagagaaagcgcttctaggatgggtatagcagacagtgcgcttctaggaggggtgcatccgaactcgcaggaaggggcgcaactcctgcattttgatgtctttgtgttatttgctttgagtctcagaaggcagccgacattgtgtttttccctcatagtctgccctggttttttgttttgttttctttttttaataggaaaagcattcctgaatcagtaatgctctcaagttaacaggtagaattcagataacttctcaaaagtatttgtgtgttggcccagagggagaatttcagaggttaaaaataataatctttaaaacttaagataataattaagggccgggtgcggtggctcacgcctataatcccagcactttgggaggacgaggcgagtggatcacctgagctcaggagttcaagaccagcctggccaacatggtgaaaccttgtctctactaaaaatacaaaaatgagccaggcatggtgatgggtgcctgtaatcccagctactcgggaggctgaggcaggaaaatcacttgaacccgagaggcggaggttgcagtgagccgagatcgcgccactgcactccagcctgggcgacagagtgagactccatttcaaaaaaaagataataagaatgagcacttattaaaaagaaagactaacaatagaccatattatattgtttaaaacttttcatcttgctaatttcattgacttataaagaaggcttgagatagtcacaatattttaattcactagttaagattatctccatccactgtaggagactttatcaaaatctgactttctcctttaatgtaagacaatagcaaactgaattataaactttgttttctgattataattaaacttgaaattgtgtattttttctcaatatttccatatatatgatctcttcctgtaccataaatagttttaagaatttgcaagcaaacttctggctcctgtagtagataggaacaagagaagctgaagttcacagtagtggaaaatgtcagattattgctctgtgttgagaaaacagccacttttttgaatgagatgctaattcaaaaaggggagcaaaagagagtataatgaagaacctaacattatctctgctatcaaatcactgcaaatacatgcaaccccggaatagttaactgctctttctgagatgccgcttcaatttgggcttaaaattgctcttaatagtgtccttaataaagcctgtctaacagcaggtctggaaaaggcaaaatgatgaagatgctctatgctttgacagtgtactgtggaccaacattgttttgttacagaacattctaaaataaaaataaacatttgtccatacacatacacatacacatattaccaggcatatggtaaagactgctgaaatgtaaatctgcctaaaagacttgaggaaaatgtacttataggcttaattaaagtatatgcaaggaaaacatttgtggcaccataataatgtcttgctgtaattttacagcaatttccattcctttttcttgcctccacaaagtttcacagcagtaggatacaatttttgcaacactgaggcggtactaggtaggccttagtgactgggaaaagtgaacccgtctttccgaagggcgagtttgtttgcctactgtcagtgggaggagtgtaaatgaagacctttatccaaagccagcgtctatgaacaaggacagtatgtttggagcctggtcagtgatgagagtgataacgtacatgctctctattcactaagtctttaattgcgctctgttcagacactaaatattggctgtggtcattgcctgcccagtatgcgaaccataagctggggtggaggcgttgagtgctggcagcggacgcaacctcttgctcagccttcagtcttactagactgtgcccacgttcactccacaccttgctcggtgaaatcctgtttataggatatttgaatcagctgttaattcctgttagcatgttccaagcgtttcacaccctttttgtccattggagtaatcactcatggaaaaaaaaaatgctatcacagccctccagcatgcagagcaccacgctaagtgttggtgatcagcatccacccaaactctgacttgtgaaacttaggatctagtcggaaaagtgggtgtcagacaaatagttacgtgcaaaacatacagttttacacagtgtgtgacgtcgtgctgcaaaggaaaagtaaagcgtgtggcagtggtgaaactgaggccctggttcagctaagtgagccagcctcgggaggcctcttccgaatttatcacgtaaactgaggcctgaccgtgtcagttccctgcagatgcagtttcctacattatggtgccataaaaatgcctcttagaagatctaaaaattatgaaaaagaactattctcttagaaagtatcttcatttaatttttccagtgttatgacaacaaattgagataggcacaagttaattaaacttaagtttatttaaccaaggagagaaaagttaatatatagtcaaactgtgtccatcattatctcaggcctattccagcttgtaagaatccagtcccttcagaagcaagaacaagcatttctgtgccccgttgctctgttcatgattctattcatccagaaccactccccagtttcagtttagagaggaccaaaccaggaacggcagatggatcttacaaacaggatattggttgagctaattggagcaattttaaattgaaatgattgcctttatttgtcttatctttaaactgaatctcaaacttttacctcagttttttacaaataaaatgcaagagggaagttgttttactgttaactgattatagattataatgcctttttcttcatgttcttatttcaatttttcacttttgaaaacgttggacccatttttttaagtgtaactccccaaagaagaaaaaaactctatactaaaatttagaaacctcctaataataactgtcccgttaataaaaaagaaaactccatactaaaatttaggaacctgtttttaataactgtcccattaatgacggcagagcttctgaggtgctgcccggatgagagtcttgtgtaaagtgtgttagagcagcctcttttcctagtcaagtaggccttgggtacaaggatatgaaaaataagctttaaaaatttatttggatatatagtttctatattctaagtgtacatatgggtttatagacatatatatattcacacatatatgaatatgtatacatatatattttttaagctcttatctaaagtggtttttaagtgatgtgaagtttaacctcagcatcaaagtatattctaaaatataaaacaactattttttatcattctacattttttatttacatcaactgtatcacccattacatatttgataaagaggttatgcctcagtaattctgaagctgaaggcttaaaatctcagcccagtgactctggagaatcacgtgttagttaaagggaaagcggcggcctcacatgctgcgtaagtttcattctcaggcatcctttctgagggacctacttttactggagatcattctgctaaataaggtaacatctagcctcaatggcagtcatgttagttaaccccctaaaccttcaaaaatatgtttaaaattatgttaagctaaataaagaaaaaaggaaaaaaaacttaagaattctgtctgtaataatttctctatattgcaaataataacctaggtatgcataaataaagtaaattattgttccaagaaatctttattgagaactgagaaaagattttgtacaataaccctagtattgcaaatattgtaaatatttttacaaatacagagatataaataagaaagggaagagatacagttggcccgcctagggctaaaagtgttacctgtccagattatgtaatccacggagtaggcttcaggtgttcagaaacggcaactcttgatattttagtgtcaggtaaaagcaggtacatagaaacccaagaactagagtatcaatataaaacacatgagcatataaatacatgggcataaaaataaatgtatatgtttatccataaatcccaaagctttggttgacccttagtttatctaaaaaaaaaaaacaaaaaaaaacaaaaaacacacgagcttatagcccacaccactggttcccgtgactggaaatctaccttatatttttcagcaagcaccgtgtggttgctcatcctccagatgctgtagcattttaacgaagacaccctttagccattcttgttttgacaaggaaaagtaggagtccatttaatgttttgggctctataatatcacatgtaaaaattttaattcactatgatcattccatgagctagaacccttttatttttaaaaataacatgaggtgtcactggaattttgccttctgggattcaacgcttatatccaaaaagggctttgttcttttttgtttttgtttttaagtgtataaaagggggagtttgggccttttatttaaagtaaaagtaaattcctaactaagaaaatgtatagtttgtgcctgaactagtagccttcattcctaattgttgtgtgatagcagtagtttttaatctcttctcttcttgtatttgttagctcattacttttttctcaccttcttccctctccctctgcccacccatgccccacctccacatgctgcttctgggtactagaagtccagctcctccaccactactggggagaagatcacgaaggtgtacgagctggggaatgagccagagagaaagctctgggtcgaccgatacctcaccttcatggaagagagaggctctcctgtctcaagtctgcctgccgtgggcaagaagcccctggacctgttccgactctacgtctgcgtcaaagagatcgggggtttggcccaggtaagaatgagtgagggagggggtgaaaaaggaagcattgtggataagttcttacagtggctttctttgaatgtgtggactcattttttttctcacaaaggaaaagctaagcctgtgtgaaagtcgccttcttgcaacccacgtctgtgtgctgtcagggagcactgggggaccctggctctgccaccaactcgcagcgtgacctcagcaggtcatgttcttggacctcagtttcgtcatgtatacagcgggccagactagattttcctgtaggttttcttacagctccagaattctctggaatctgccagtagttcatagtaaatactcagaaatgttttacaaatgactgaattaattatctgtgtcagatataagtcacatttactgcttccctctatccagaacaggttagcaggaaaattaagtgatacttgtcaaaccatgcccacaataactggacagttaggagggccattgctgtgacctccagcgggctaggcctgaggtgtgacaggggagctgcctggggtgcagatttaaggagctatccactgtgtgcttgcttgactctcagagtgagtgcgtcctgaagtctcataccccaggcaccggctttcctcactgtagccctcgctccttaatcaggagtctagttgtaggaccacgccctgtcataggaacagggaaaaggtactcactgtgtaacctttgtctttctaaatacatgagtcaccagccccaaagcatagatgagaaaactcctgtgtaacaaaatcaagtacaggatggggtgcagtggcttacacctgtaatcccagcactttgggaagccaaggcaggaggatcacttgaggccaggagttgcagactagcctggggaccccagtaagactttgtctccattaaaaactacaaaacttagccgggcgtggtgatgcacacctacagtcccagctgttcaggaggctgaggtgggaggatcacttgagcccaggagttcaaggttacagtaagctttgatcacactactatactccagcctggttgacagagcaagaccctgtctcaataaaaaataatatattttttaaaaaatagaataatgctgtagcccagggacactcacagggtagttggtggggccaggtctgtctgactccagacacatactcttcccatttgccactggttctggagtccagctatgcattagaatggcctgggcagcttttcaaagctgtcagtacctgggctaccacccgacatcaatgaaatgaaaccttctgtgcccaaggtaatctaacaggcagtcagaatcaggcgccctgcgccccaccaaggtggcgggggtcactaactatccaagggcaagtcatctgccctgcaggtgtcactgacggcctaccgtggtctcagtgctgcgtctcgggggagaaaggggaggccttctttgtgcttagccttcccactaggtgcctaatccattccatgggggaactgagacctgtgacagaaagaattagagcttgcccatgacgctgcataaccagctgctaagtcgtgtgataccacgtgtgagtgatggtcagcaaagagaatgattgagacacgcctctctctgacctggactccctgacctttcccctctgcacctgggctcctttgccttctgcccctggactcccctgacctttctcccctgcacctagcctcttctgacatggattttttagaatcaccaagactgctcaaacgattagattttatcagccagcacagagtagatagtgtctggctacttccttactgtgactgtgtccacagtatatataaccaggctgggtctgtcatgagactctccgcgggcttataatgagggttgctggaatgtagctgggttgcatctttgtccccaccccatcatgctgtgtaccttgtgggcatcagatgtggttgggagcaggtgctgccaccacacaaagctcagctcccagccttccttcttaggtcacactgagcagcgcccagcttgccatttctgaagtaacctgaagacccacagtttgcagccctgcattcagtgccaaaagagggcggtgggcatctccgggagcatccacaatttattatacaccaccgagtactaagtaaatggacagaagagccgtgtgagaaagtttgaacccagaaatttaatatttcattaaaaaccactgtccccttacctcctcccttgccacacaacgcaggagacatcaaaaggcaaaaccttccccaagttatttgcaaatcctcatgtttcatccatgtgtttaaccgtttaacctttcataacctgttcccaagtgggaatcaaaaggttaaaataatgcctcggatcttgacgtcacatttcaggagttctctttctttctcctccttttgcgactgtgttgtctccagccctttaagcctccttgagtaagagcaccgcacaggaaggtgtgcacctgccccgtcagcagggctggtggccagtggcatcgcatcatgctttttaagttgggggccgttggtccaggggctcatttgcctttgcacgaggtgctgcttttgcttttgcctgacaccccaagcagtcttggggtgaggggatgggtacggcccagaatcacaggcccacttctgagggcttgcagctgctggaatgagcactttcacatcagtgcccaaaaacctaacttggaaaatagtgccgttgttgctttttaaatgttttgagatgccctttttccttaattggaggtgcagtgggatgagcgtgaggcgttgggagatgtggcgggcagaaggacctccgagcagtgctttttctgttgccatcagcaggttccctaatggttttataactgtaaatgctgcctatgcactgctgagtgggagtaatgagcattagttaaaagaggcaaatgaagaaaagtcaaccaagacattaagtgctttttttgtctcctggctttaaacaagccactttgttgcaaaccaatgatcctgccgtgtttttcactaggttaataaaaacaagaagtggcgtgagctggcaaccaacctaaacgttggcacctcaagcagtgcagcgagctccctgaaaaagcagtatattcagtacctgtttgcctttgagtgcaagatcgaacgtggggaggagcccccgccggaagtcttcagcaccggggacaccaaaaagcagcccaagctccagccgccatctcctggtaagtggcggcgctgcagtcactggcccaggaaagcccaggcgcctggcctgggaggttccgggaaggtggtttcacagtcaggccaacagggaacttgggacttttgagaggtggggggttcctgtgtcgttttgtttatttaattggacgcccactggcagtgttaagggatgagagaattaaatctgggatatggccatttctggttgacacttggaaggcaccccttcttttgctttaccttaatcaaaacaggctttcgaattctaagccatatacgtttattgcttatacaagtattcaaaaagattccatctacctctacacaaaataaagatcccccagtggccagtttgaatacatgtgcacttctaggaaatgccaccctacaggttcgacagctcgagctcccccgccctctttcggaaatcctcagatttgaactttagtaaaatgaagcctgggcttcgtttctaatgtcccctacccagcaagttctcacttctagggaatttaacaagctgtcgtggtaaggatccacacggccttgttttggaaacaggtggtcttttgcagccttgttctggaagtcaggggtcttaggaatgggtgcagcgctggccaccaacacgctcgcaggccgagccacatcagtgacgcctgctggctcccttccctctcctccccactgacagagaccctcccattcctttcagctcccctgccagccttcgttctaccgtttggctttcagatttgaaatgacaaaatcatatattctgataaatgcaatagtagagaggggaagaaattggcaccttagtgctgggtggtgaccttactccagtagatccgaccattctcttatctgtgtctgcctcgcagtcagcgaccttcagcacattagcctcactgttcctggtccctgtctatgagatgtggctgcacccaccgctcctgtacacagcttgttctgagcgtggctggcagcccatgtttcctgagcacttccagtgtgctgggcccttttctaagtgctatcatttcattttcacatcagccctgtgacattgatactattttaaaatccatgagaaaatgaaggtctcgtggaatctaagtacttgcccaaagccaactagctggggagtagaaggtcttatctggggcatctggtgctacagtatacacgatacccaccagacacctctggctgtattgaaaatacctttgtaatatgtgaaatgtttacacatagaagccagagaaagaggtcatttcatttttaatgatttcctctagctgctgtctggatggcaaagctgatatccaaggttgctaatcaagggatctcacataaatacgttttaggcccaaagtgcacttgtagtgaatatacctagaattacatctgtaggctctaaaaacaagtagaaatcctcgctaacctcatccttaaagattcaaaggctttaccaactcaggtgtcccttaaaaactgggaaatctaattttaaaaatctcacaacattacatccagttcacagagtaaaacaagctgcctgtgaacagctctgaaactatttttccaaaataaaaacccagtggggcgtagggaccaaagtggtgatgtctgtaaagatctaagggtacattttatttgccaggaaagaactcgtgtcactgaatgggctgcacttgtgtatggagaatagctctcccagtgtgcatcagcttcaggacgggggccctgctgaggcgtatagatccttcagaaagtggagggcctgttctcttaacagccagccgttcccttttccccttttttaaactgtcatttttatggcaacattatcattttaactacacaaaagagcttggattgcaaatggactcctggtatacattcttctcagtagtccagatggagccgagggcctgtgacacaggaggcagtggaaggaaagcctcctggtctcgtccagccccgagagcgcgtgcagggggctccaggcacacacaggcgtctgggggtcgcaggcagaggcaccctggtcttcagaagcctctcgattcactgccacccacacagcaggtggcctctccgattccagtcccatcattagggaaagtgtctggaaacatttttgttgttaaaggaaaataaaattattcccaactattggccatgttagagtctcatttattacaagatttttaaacacaaatttacggtaaaaatgtatgttctttgaagtcactttttcctggaagaacataattatagtttattttttaccagcacattcaggcgaactaaactaaaagattctgaagaaacattttagattttttttcacccaatggttgctctgaaccagctaaaatcctaagtcttttgactgtattctaagagcactctaagtcatctgtctctagtcaggtttcaatttggggtgctaatacagctctaggcttcaattctgtcagcctctgggaggcataagccccttggcccctggggctgcaccccacatatcactgccaagtggctgtgtggcttctcacaccggatgtctgggttcctgtcttccagccaccagagcaagtcagtgattgagactcccaggtgaaccaaggcaaggccatggggtgtggtttgtgtctttaaggtgccagtggcgatcttgttataaagcatctagaaaaggttgtgggggagttccaatgagcgctgtaggaagcacctccccagcctgtaagctggagatggggaggggaatggaagggaccaggctgggagaagtggggcaggggtggggcatggagctccacattcggttaataagtctgtaaccaaaaacccatccatcttggctggcaggtggctgactgaatttctattattagctgacaggtgatgtcacaaaacctgtcatggatccaactagggaatcctcagtggaagataaatgagaaagggactcaggttataaacagaggtgccctctggttgacctctagtcactgtagacctgggacatatcagctattccttctccccaccctacttcgctcaaccccgccagaactagggcaccaggttcgtgccgggtaaattatcttcccagctaggagcctggccatgctgtctgaagtgtgtgaatgtacttaaccttcagtaacctttccattgtttactttagagtatacatttgtagcttctggcaaaaggtagggatgtcctagagagcctgccagcctcctctattaatggagttacaagaggttgcattcattttttttttttccatgaaaggaaaggaaaaaaaaaacactggcaagggagatttttcctttttttttttattagctataaatgtgaatacttgtaaataagggtctttctgaaatcaagccttgcaagtgatgtttccaaggaggctgtcggctggagcggagcctgcctgaatttcgaaagcaagtcatttctcttctgcagcactaggcgggcaaccatgtctgcaggattattacccttttatatctgcaaaagacggctttcttcctttactccaatatacctttttaacatgtgtttccagggttttacgcaaatttggtttgtaagtatgagtgaatacatttttcttttaaaatacctacaataagtgtcaatcttctctgtataacaaacccccatgacatgcgtttacctatgtaacaaacctgcacatcctgcacatgtacccctcaacttaaagtttaaaaaaaaaaaagtaaataaaaacttttttaaaaaagtcagtctttgtggcatctctgagaacttctctaagtcattcagtgcagggctcacagggacggatgttacgcagtgttcagctctgttggccagcgttcattccaacccaggccagaggctgggcagacctcatctggctaggaatgtctctgtctagctgaggctttccgagtagaaataatgtactcattttgatttctgactccttcccagtgtcctctgtaacctctcgtggtttgtttcacctccattgccactagagtaaaatgtgaataatggtagttgtagtgagccttgggaacgtcataggaaaggcattctacacaataacatggaaaacgttattcacaagcagcagtaatcctgccatttgttcggggggttctgcacgtttttatcagaaactccatgagggcaggggttgttgtctttcttatcagtttggtccactggtgtatgtgagcatagaagagaacctagactatagtaggtgtattactcatttattaagtatttgtttaattcacacatgaaaccagtatctattgatgatctggcgtgctaaggactgcagtagatgacagagcaggagccctgcaaatgttacgtttttccctcaaggtgaggttaattaatttttccaagagtcccacataaggtttggaaaaaatcagttcaattctgttattataatgtaattatacttaaagccaaatctcagcaccctgataacagcattaaaaaaacgccaaaccagtatgacttgtgctttttgataacaaatctgatttcataggtcaaaaagtgacactattaatgacagcacagacacattcagatgttgagaagctattgaaatgacataaggctcattgttaatttgtgtccttgcttttcatcttaaacatttcacattgtctaagacccagaactaagttttctaatttcgtttctaaaacagcacaataattcatcgagttgatgcacaaaaattttcatcccatttataaaaatgtacatttagattatttccagtctagacaacagtgaatgaacactcttctgcctaaagcctcctttttattagattattttcttgggataaataccccagaaaataagtatccagtcaaaagatataaatgtgttttatggctcacaaatgaaatatgttgccaaatagtttactcaaaaacttctttactaatttttactgtaaacaatagaaaagcaacgaattttacaacatcattatcagcaatggctattgttactgtttctaataagatggtgtcttatttacatttatgtctttcatctgtataactagcaaggcagctgggcttacttgataatctctggatttcttcctgtttctcttggtgctgctactatcagctaactcgggatccttgcaaggcccacagaccccccagtcaactggcagcaattccatggcagaggttccaggtgacctgaagccacctaccccagcctccacccctcacggccagatgactccaatgcaaggtggaaggtatgttcaaataactctgtgaggcatacaaagtcacatttgttcatcttttagttttctggggcaaacttcacagagagaagaaatggtattccctagagagtttttaaatgttgatgactgccagttttcttcatgtcatttatcttgaatggtttttgcatttgcacatttcaagatgggttcatcttctgaatgtactgtttggaggtaactcctgctgtatcattaagctttcattctttgcctctcttcagaagcagtacaatcagtgtgcacgacccattctcagatgtgagtgattcatccttcccgaaacggaactccatgactccaaacgccccctaccagcagggcatgagcatgcccgatgtgatgggcaggatgccctatgagcccaacaaggacccctttgggggaatgagaaaaggtacgtgtagaggggcctccacccggccatggaccagtgggcattctactctctgccgttccacaacagttcacctttcactcagaacacctctgagcccatgctgcatcggtgtgggtcccaggtccccatcctactccacttgtggccttgggaaaagcagttagcctctttgtgccctcatcctgtccccggctggcctcagtgccctcagcctgttccctggcacatgctccctgtttccggatacctgccacctccttacacgtgccaagttacgttcctcatctagaaattgggaaaataataggacccgcttccaaaggcatggcgaggattaagttcctgcaacagagctcagagaagagtggctggcagccgcggtaagtaagcacgcacttcacggcacttggcatggtggtgtgctagtgtgcgctgggcgctagctcgtggattggtaaatcagagtcgctgcccaccttcagggaatcacagactccctgccttcttacttcctgggaggaagcaaaaaataagttaagcacaaataagcagttaaagattgtggttggtggaagacaggaaagtgaaaggaagaaaggatacagatagcagtggcactgggtggcgcggtgggagagagggaaagcgatttagactgagtggtcgggagggaagggccctgaggacctgtcatgggggtggtggtgggaatgagcttggtgtatgaggaggtggtgggtgtccagagcacagtgagcatgggcccggggacaggctgaggtcgttgaggccggcggggccaaagcctttcggtgtctgtgggcgtattgatgaatctggatttttccccaaggtgaaagatgttatgcagggaagtgatgtgagtagtttttttttgtgataaataaataaatgactggccatctctggagaatgtactggaaagaggtaagagtagctttggggagaccactgtgagagtctagggggagctggccaactggagccggacaccagcagcacagagggaacccgccggcagagtgtatgtcagaggtgctggtggagtgaacgcgggccctgagggagaagctaaccgtgactgggcgggtgaagacattattccctgcaatgcagaggattggaaaaggaccgggctagagaggggaacctggagtccctctggggtgtgtcccggtggtaaggcatggagtgcatggctggagctgagcagatgttgggatcggtatgatcttggagtagtaagtgtagaaatggcatctgcagtgatgggattgatgagatccttgagacagagagtgcagaagtttatgactgccatcaggagacaccaggctggcccttcccttgatgcctgccgactcccaaggttgaggtggcactgaggctgtgactgtctgagccactgtccttcagttctgcccgtggtctacaagccacaagtggagacttgatattttgctcttgcgcattcttccaagtgcattcaaggcctgtgaaattgaagcatgatgtgtatattattggaaaaaaacatatagaataaatagtgaataatatttttatggaaatacttactctggaatcccttaaataatagtacctgtgttggggtacataaatttcttgataatattgtctgagtggagagaagcataaagcccaaagccttggttttcatatgtattatagaccaatgaaaaagaacaatggagagtctttaaaatttgagtatagggcatataccatttaaaaatgaaattcatagtatttcatgtacaacatttcaggtaacactcataaagcaagatcatctatgatttttttctttcaaaagtttcagggctgcttattccaagtgaggattttgtaggacatgcagtaaatccataagcttagaatttcaaaagctttgtgaatgttggggtagctgtttttcttagtggtatgagatgctagacagaacatttcgttagtgcttttggtggctttagactctgaaaatatgacaacatggaaaaaaataattagtagtatttagaatttggcctcaaaatgtattgcaaaccattcccatatcccaccgatacaccacattagacaactataggtgtatttccctcgtgtcctcatgcctagaatttcttattacaaaaataaatttgtgggggtggaatgattctgggatcaccttgctaggccctaggtagatatatgcagatacttctcaccttacagtggggttacatcagaagaaacccatcctaaattgaaaatattggtaagttgaaaacacactttcacttacgatatttttgattgacaatgagttgatccggacataaccccatcttaaattgaggagcatactgaatgcctgtcgctttcacaccatcataaggttgagccatcctactttggtgactgtctgtaatgttgttttcatcaaccatgtaaatgatccccggtggcaagtacaatccctagtgtatttcagttcacctgctgccttacggtattgatgtattcagtaccaaattaaagcagataaacagaaaatccacgggaaacacattttctaagagtcttaatcctgttgtgtatagttttccattcttcagtttgccttactctgtcagtaaacttaatggtgctctgattttttatttaatgactaacttcagtggaaaacatactctttgtcgctgttgctgctgctggtggtgttaacctgtagtacaagtagcatggtcagagtctgatctaatattagccctcagtagccctgaggggcctggccctgcctgttcaccggcctgccttccctgccttcttacttccttacttcactgattgaggcattgattgattacatataaatgaacatcattttatatgtttaacagaatagtatatatcgaatttatattattatctgtacacatagctctactttttttaattgaatagatacaccctaatgctctagtaatgggtgagttgttccataatcttttctattataaacaatgaagcagtgattgttgaagtacagttttttcacattgtaagaatgtttctgcgaaatagattcctagaagtagaattgttgaatcaaaggatatgaactttttttttagtttactgagtatctcagcttttacagtataacaaactacccccaaatcttagtggctttaaaaacagtaacacttaattatatctctcagttctgtggtagactgggtagttcttcgctctgtgtgtcatgttgtcagctaggatattgaggtggccgccatcatctgggagccaggctgagagctctgctgggctctgatgtctctcaagtggctgatgtcatccccaggctctactgggacctcaactggagctgttggctgcagcctcctccatggggcctttccatgtagtttcttaggtgcctataacatggcagatggatttcaagagggagcactccaagaggacaggtcccgggagcaagcagttaaaaacttttgcttgcatctcacttgctggagccctcttaggcaatgctaatcacatgaccaaacccaaaggcatcatgggaggggtttcccaggctgcgaatgctgggagatgcacttctttgggggttgccaaagcacagcctcccatagcaggtaaagcaggtattggcaaagcttataccagcttaatgttctcaacaaaagcatgtgagagtgtgcgggttctcacccccttactaagaatgatcattgtccatcattttaacattggccaatcagatggaagggggaaggcctcattactgtttaccttggattcattccattattagtgaactcacacatcttttcatatgttgattgaccatttgtttttcttttgtgaatgttcatttatgtgtttgcccatttttaatttgattgttgcttttcctgttgatttttttaaatttccttgtgtattagagaaaagctatttaattatgtcacgtgatttctttctatctctgttttcacatctacaaaatagaaagtaacttcaaaactggttctaccacaggttgatgtgagatcaaatagataaaacaggtgaaagcacattgcaaaggaaaatacttgatgctggcattggcccctctctaccagcctaacaaaatgtatctactcatgaaatcttaaccagcttttgcttcacataacataaaagtaactatcataggatggagaaaggtagcaatactgtataacgatgaaaatttatattaaaatgtttaatttgccttcaggctagtttctggactgaacacaatttccttcaggctctgagctgatgctaatttgcatgtactacctacttgtcactccatcctgtgttagaaatagttgtatttcatcccatcttgagctattcttaactccttaataatttttttaatccttattttggagtgaatcagtggctgaatgttaaggttttcaccttttttcttatgggagaagggaactaactttgtatacatattttatgtcctccttacaaccatttcatgagataatattactggcctcattttatagacaagaaaataggggccaggtgatgactcatgcctgtaattctagcacctcaagaggttgaggaaggcaggcagatcacttgagcccaggagttcgaggctacagtaagctacgatttcaccactgcagttgcaacattgcacctcttatcactaggtgatacagcgagaccctctctctaaaaaacataataaaaatgttgaaaagaaatgaaattaaactcagaggtaacttacccaagtaaggaatggatctgggcctgtattagttttctatgttgttatataacaagttaccacaaacttagcagcttaaaacaacataaatgtatgatcctccagtgtctgtggatcaggaatctggcacagtgtgactgggcctctgctcagggtcccacaggctaaaatcaaggtgtctgccagcactgtgagctctttgaaggctcagggtcctcgtccgagtttatttaagtcattggcagaattcacttgcttgtgtttgtgaggctgcagtcccgttttcttgttgactatcttctgcccaccttccctaacacgtgatccccctccacagcatgccagttgcttcttcaaggccagcaggaaaatatctctgacttgcttcctctctaagctctagatccaaacttaaagggctacctggacaatctcccttctgtttaaactcacaatcggctgattagtaactataatcacatctgttaagccccttttgccatgtaacatacataacataatcatgggagtgataccatcgtattcataggtcccacccacactgaaggggaggggctcatggaaggtgcccaccgggcagggggtgctggatcttcggggccatcttagatttctgcccccacagagcacatcttggctccacaacttatgctctttcaatagtattatggtctatcatattaagaaaaagtacaggccaggcgcagtggctcacgcctataatcccagcatgttgcaaggctgaggtggatggatcacctgaggtcaggagttcaagaccagcctgacctacatggtgaaaccctgtctctactaaaaatacaaaaattagccaggtgtggtggtggatgcctgtaatctcagctacttgggagggtgacgcaggagaatcgcctgaacccgggaggcagaggttgcagtgagccaagatcacaccactgcattagcctgggcgacagagtgagactccatctcaaaaaaaagaaaaagtccaaagacaatagagatgactagaagggatggatgggcctttgactttcagaaatgcctaaatgtatgcattttatttaaaatattgcagtgcctggaagcagcgagccctttatgacgcaaggacagatgcccaacagcagcatgcaggacatgtacaaccaaagtccctccggagcaatgtctaacctgggcatggggcagcgccagcagtttccctatggagccagttacgaccgaaggtgagtattttttaagatgacaatatgatgatttactagaaaccgtgctttcctcacacacacatttctgagccctggcagctgagccactgatgacaatatacagtgtcccctttcctgtgaaagtaaagaggcaatggctgctggtcaccaggtgagtgtcaggtggctgccctcagtagatggctattcaggaccagggagaaggaccttggccttggtaggagtcttcttcccgaagtcaagagccagggccgccacaagtcacgctggcacccggcaccagcacccagcttccttctgagggactgccagctgcacactccagacatggctcgcctggagctcctggatgcctgggcctccacagcacccgctcccctccctcccttctttctgtctgggggaaaggcctgtgcagtggtagccacactgggctttcagcattctggaaaggtcttccaggcagtgcttttcccctgtgaatattttaaacagagggacaatactttgctctttaataaacatctctagaaaacccacagcacaggcctcactgcagcctcgcttaaggaagtcatcttgaaatgactgaaaatggcaagttaaacttgcaagttaaaatggcaagttcagctgcaggactgatgatgcagagtgatttgtaactagataggaggaaaagttattgaaatggctctgaaaggtaacctgaaaactgcttcctaagatgatggcatagggtaggcttctttttgtgaagaaagtcccttgcctgggccctgacttcaatactcattgtcacaaaaaccccttccccttgttgggtatgttctctacctcctagtaagagacatgatgataagcaaggttttcatataatatttcagatttttaaagaaaaaagatagaggcataatagaagggcttttccctccccggagccacagtgtgtgccacagggtggagctgacttcgggatcgcggccttcggaagctgcgtgtgctgttctaccggggaccggctgggccagagccgctcacctttcatcagcccacatgctggggtcacagggatgggtcagtgggaaagcttcctcagtgtaatacaaaggagaaaaaggttgaaaaatcacggctttaccaaatgaggtttctttatggtattgtctgtgagccttgttcttgagagtccatcccatgtttaaggagacacggtgctttctcctagggacctaggaatttactcttctaattcttaacccggccataatacggccaatatttacttgtgatatattcgttaatcagttaaccataaggtaacatttagtgtgctgaatcaaggatttcagttaggtttgttttgtttctgagggtccaggaaaagctacagatgtttttttggggggggtagctggcaagattagaagaacaattatctgggctctatctaccacattaaagagaggtttacctcattgttaagttttctcttctgaaaaatgttgcttgttaggcaacttaaattttacccatgtcaattacatttctttcctcctatctctgcatttccttcttagatatcaaagtagttatcaaaagttcccgtgtctgtttcacatgtgatagtctaaaaattcagttatttgtttttattattctcattccttgatcagcttaggaatatattcagtccattgttccctttcttacaagatttagtatattaaaccaatgtatttttcaaagttccaaatctattgtcttttaaaacatgctattttttatggtatttataatttcttaatatactagtagttgaaaaatgaatgtattattcatttccattttaagatgtaataggtgtacatttgaatcatccctgttattcttttctggagccttttagggcataggactgtgaaattctgagcacttgtatttatataatgattagctaacatttgaattaaatttgaagtatagcttttaaaaattaaacattttccattcataatgagaatgtgcaaagtacaaacattttgatgttctggcacttgtaggaacattgcctttgagtcttaagttcttcttgctgtttcttgcttcccttaatgcctgtcatcacagcactgtacgacacttcctaaggtacacgtcagtggacaggcggggctgcggcctccaagcagaggccagaggctctaacaagtgcttacagggtgcctgcctgctcaaccggtattcctctgacacctattagccaacagcccaaactaggagcttggcaccattcccaaaatgggtgttcccatccctggtgctaacagttggcgtgcagctgcctctcagagggcctttgtcggaggggtgcgcagtaaaagccacacagagctgcttgagggagtcagggttccagaaatggattgtttatttctctgtttgcctgaagctttttctcagttaagttttctttgaatgcctcattccaggcatgaaccttatgggcagcagtatccaggccaaggccctccctcgggacagccgccgtatggagggcaccagcccggcctgtacccacagcagccggtgagttggcaagtgggcgtggggtgctgtgttttctggttctgtcctggaggctaaaactcaaacttgtcttacttctgaagattttcagacatctaacaaaaatgattagtgtttgttgagcattcaggatatagttaatgctagaaagtactcctgggatgttgaagtcagcaaattaaaaataactcttgatacacggtttcttgaaacacatatgacctgtaataagaagttgagtgtattcatccttgtaaataataacaagcccaagctagaattagtatattttaaacatgtatctattgtgcatactgttgtatcagaagccattttagaacagaaatttgtcaatgctttaaggagaatgtgtagaaaagcaacttaaaatattgtatactaatagtgaaagtgaattggcttatttaaaaatgagataagatgctaatgatacttattttgaataagtaggacaggtttttgctggttcacaggtgaccattgcagctcagagatgctaagttacgcaggatctcccccttacagtgaccagtgccgctgcaggaaccgcccttcgtggtgtggctttccagacatacaggactttgctgtttttaaaaaacttttcagatctgagaactcttgcaaaaaataaaaattttgaaaactatatatatgttatataattataataattatatataataatatgtatatcatttttcatttatttaattttgctggagcatataggcacaaggaattgctttttttctttttttgagatggagtctcgctctgtctggaatccagtggtgcaatctcggctcactgcaacctctgcctcctgggctcaagcgattctcctgcctcagcctcccaagcagctgggactacaggcacccgccaccatgcccagctaatttttgtatttttactataagagacggggtttcaccatgttggccaggctggtcttgaactcctgacctcaggtgatcctcctgcctcagcctcccaaagtgctgggattacaggcgtgagtcactgcgcctggccagtgaattgcattattaaaccaactgatcttaaacagttttcaagtaaagtggaaaacatcagcatctcactgcctcccatcagagtcccacctaccccgattaagcactggtcccggagcatcctgggaagcaagcttaataacaggtgtggtcccagccctgtcctcagtgctgggaccagtggggctttgggggagccacacctgaccaggccagaagtcagggcaggagccgtgggatggatgttgggtgacacgggccagtctggggagccgagtcctgttcgggggcttttctgtaaaatgaggcccaagaaacccttttaccccaagaccctttcaggccggcccctggatgctggctttcctgtgagagggtccttctgcctcctgctgtggtcctagtgcagctcccagcccgggagccgtctgcctgtgtgggagttgaacgctggctgtcccggtggcacagcctaaggagaggaggcttttttttttccacaggaagtttcaaacacgtgaaaacaaactttggatgctctctcctcagtgtgtgacatggtgtatataatactgaaatattgaacataaattgttagttctctgttgttataggagcttcccatattcattttgaaatgaacattctagcaggtaataactattttgcataatttcagtgtgtgattatacctgtaagagcacatcaggatgatttgtctttctgtgaattccagaattacaaacgccatatggacggcatgtacgggcccccagccaagcgccacgagggcgacatgtacaacatgcagtacagcagccagcagcaggagatgtacaaccagtatggaggctcctactcgggcccggaccgcaggcccatccagggccagtacccgtatccctacagcagggagaggatgcagggcccggggcagatccagacacacggaatcccgcctcagatgatgggcggcccgctgcagtcgtcctccagtgaggggcctcagcagaatatgtgggcagcacgcaatgatatgccttatccctaccagaacaggcagggccctggcggccctacacaggcgcccccttacccaggcatgaaccgcacagacgatatgatggtacccgatcagaggataaatcatgagagccagtggccttctcacgtcagccagcgtcagccttatatgtcgtcctcagcctccatgcagcccatcacacgcccaccacagccgtcctaccagacgccaccgtcactgccaaatcacatctccagggcgcccagcccagcgtccttccagcgctccctggagaaccgcatgtctccaagcaagtctccttttctgccgtctatgaagatgcagaaggtcatgcccacggtccccacatcccaggtcaccgggccaccaccccaaccacccccaatcagaagggagatcacctttcctcctggctcagtagaagcatcacaaccagtcttgaaacaaaggcgaaagattacctccaaagatatcggtaagaattccaaagctttcattctgaaatgaattccagttgcagtgtagaattttaattttagtaaagatgctgttcctgctcatcttaaagggatgaaaaaattatgactagaagttatcaagatgcgtttttatataggagtaatatagttggaggctgctaatctgaattaagaaatagtgccagaaagattggccgggcgcggtggctcatgcctgtaataccagcactttgggaggcccaggcgggtggatcacgaggtcacgagatcgagaccatcctggataacacggtgaaataaaatggtagttttacgtgtgaatgttatttgtgtgaaagattagagcttcaagtaagagatcagggaatcctgagtggttatatgctgtattttgggcttaaagatttgaacttaaccaagccacttaatcactacaatacgtgcctaacagacccccccatgaggctaatgaaatgctaaaggtgacctgagaaaatctgaaggcaagccactctgtaatttggtgacaacatacagtgaatttccgtgggaaaaagttaaagcttgtatgtaatatgtagattgatagatggtatgacataaagaatatgctatgctgtgatacatagaactgatatcatccaatgcactggtagacttgggccaagaaccatgtcaatcgaatgctgatgttgcttgtttatcctctgtgggatgttctgaatactaatcagaggtctggactatctggaagtacacacagggtttctgcattatttttgaagtacttttaacacaggaaggaagataatagatctgagttatattaggaaaaattactcaaaaaatatcaagaacaaattgacttaaaatctttttcagtgattagaaaattaaagatattaataatttgaaagacatcaatcactggacattaaggagatgtagattgagagaccagggcaggagaatcacttgaactcaggaattcgagaccacccttggacaacctagcaaaacctcgtctctactaaaaagaaaaaaaattagccaaaagtgagattcatttctgtagtcccagctattcaggaggctgaggtaggaggatcacttgagcccaggagatcaaggcttcagcagtgactgtgccactgtatacacacacacacacacacatattcctttatatatatctatccatttatatataatgcatgtgtatctatatccctttatatatatatatagatagatataaatatagatatatagatatatatagaatatgtgtgtgtgtgtatttatatggggttgcagagggagagaaggagacacagacactgagcaccattttatatatagaaatatatacacacacacacacgtgtattgtgtgtttatgtgtgtatatgtatgtttaaataaatacatctaaattttctaaaaatctcccagtgcgggttatatagcatttgtcttcaacctagggaaatttacatgtttatttttaaaagtaattttgatttttttattgtaaaaacagtatgtagctatcttagaaaattttaaaacagataaaataaaagtggaaaagccacggtgtctccccctcatgcaatgattcttggtgcctggagaatgcccccagcctccaggcagctccagggatctggccgagctgggtctcatggcaaatcttccaaactttctacctgatcattttgtttccttcagtagcaggaatagggaaaacaacaaattacttcccattctgtggctccagccatactcctgagaaatctgagccatcaaagtgctaatatttatcacagcatgttctgagggcaggagcacaggactagaggaaagcagcctgggaagccaaggccgtgtgtctgaggaggctgtcttggagttaaattttgcttccatgttctgcatacttggcggccttccaggacgccaccttgagacactcgtgagtggtgaagccaaaagaagacaaataccacttttgggtttgactcatttattaaaagctctgataccacattgcagactctgtagggtggctgaaagaaataacccggccatgagaaaggaccatctgtgctcaaccactccacctccagaagcactttcggcccctgcgtgaccaacaaagcgagatctgaaaccacaaaagtttctcgttacagctatggcctccatttaaaatcggaaatgatcacgcttaactgtccttgagagcatttgtttaaagtcaatatttaacttaacactccacttattttttcttactctttcgttaactttcgttctttcatgcatagagtcaacattcatgatatccttgttcttccccatcttcagttactcctgaggcgtggcgtgtgatgatgtcccttaaatcaggtcttttggctgagagtacgtgggctttggacactattaatattcttctgtatgatgacagcactgttgctactttcaatctctcccaggtaagccagcatagtccaactaacaaccaaattaggataggagagcatcaggccatgcacatttgtgcttgaactaatgcctgagttgatgagcactgaccgtccaacactgttaatcactgcagttgttatcaaccagccttaatcaatgtagagttatctgggataatattcactgtagtctttagtgtgtgtacacacacatacctctatttcttatgagagaacagtgactgtgtgtgtatgtgtatatgggatagatgacagtagtaacattaaattgttcagaatgaatattagctggccaatgggaagaaatcaaaatgtaacattaagttgtgactggagtcagcattggaaacacagttggttgcaatgggacataaccctgctttccaggaggacttgacatcttcttttcattaaaaagatattcaagatttagaaattttatattctatacatttatagaatgtataaatatatatagaaggagagagagcagtttaatgaacccccatgtacctgtcagtcagctaaaatagttatgaactcatggctaaacttacttcttagtctatgctctctcatttctgcctctctccaggttattttgaagcagtcatgtaaaagcctactacttttaatgagcttaaacccctcctttgttcagaggtaggcttcaggtagcttccagcataatagctagaagagaggagcactgaagtttggggaaaatgcccgagtccactgggctatagacttttaaagaaatatttagaaataaaaaatggaaaaaggtcattttccctatagtatacaaacaactctctactttgagtgcaaaaactaaaacacttaatttccttgcttctaaggaaataagaccagaatcttctacttctttcttctctcatttaagccctcattatcagcctagaaaggcaatttttcaattgctagaaagtttattaataaggtcataaacattgtacgagttctgtgttaacagaaaataagtatttaaaaactgtatactgcatttgctagagtaatgcgctttcatccttatgttaggtgaactgttgttgatcacatatttgcataaccagaattgctttattaactttcccttttcccctggaaaaaaaagggaaaatgcccttggaacattgtgccttcagcacactaaaagcagttctttctagttggtgctgggggcttcccctgacttcttaaaaattgttccaactctactttcaagaaactgacagtaggatatgaaggtatagctgatttccagaacatctaccgggaaagaatccttgttagaatccttgttacttactctttagagttcctaaacatggtggggggtgttgggagagagggcagttgctaatcgtgaagtgtattggttttttcttggtacagttgcttaaaggaaaccaaacttgttcttgtagtcagtggttctctcatagtggtttttgcctttcagctagagtcataaataactgaaatgtaaaattgcattttatgaaacattttaatttatttatcataggctaaattgatttgtttttaattttcagtgttcatgagctaccacattgctgaaattatcttctccaaaagatatatagagaacataaattagggtgacctatggtacctgagacaaaaataaccataaaatcctaagaataacaaccataaaaatcccggcaagcaagtctcagataaataatagaagagaacagagtcactttgggcaaaagagtctataaaatccatgttcccactcttctaataatgagtacattgtctctaaatcaggaacagaaaggtaaagaacagcaaggcactccctcagtgataagattagagatatgagaataaaaagtaagttttcgtgtagatagtctaagcaaggaagcagcaaataaggaacatgctaaacatcggtttagtttatactgtaaaattcaggaagttcgctggacctgaagggtagtttatctttcatggtccagccaaaaagggagacaaacgtgtgacaatgatggaaaggtattgacgggtctcaggatctttaccctcctcggtcatatctgatgtcatgacattgtacctgttctttctttcttctcctcctcctcctctccagttgtctggatttctcgaacttttagtcgagtactttagaaaatgcctgattgacatttttggaattcttatggaatatgaagtgggagaccccagccaaaaagcacttgatcacaacgcagcaaggaaggatgacagccagtccttggcagacgattctgggaaagaggaggaagatgctgaatgtattgatgacgacgaggaagacgaggaggatgaggaggaagacagcgagaagacagaaagcgatgaaaagagcagcatcgctctgactgccccggacgccgctgcagacccaaaggagaagcccaagcaagccagtaagttcgacaagctgccaataaagatagtcaaaaagaacaacctgtttgttgttgaccgatctgacaagttggggcgtgtgcaggagttcaatagtggccttctgcactggcagctcggcgggggtgacaccaccgagcacattcagactcactttgagagcaagatggaaattcctcctcgcaggcgcccacctccccccttaagctccgcaggtagaaagaaagagcaagaaggcaaaggcgactctgaagagcagcaagagaaaagcatcatagcaaccatcgatgacgtcctctctgctcggccaggggcattgcctgaagacgcaaaccctgggccccagaccgaaagcagtaagtttccctttggtatccagcaagccaaaagtcaccggaacatcaagctgctggaggacgagcccaggagccgagacgagactcctctgtgtaccatcgcgcactggcaggactcgctggctaagcgatgcatctgtgtgtccaatattgtccgtagcttgtcattcgtgcctggcaatgatgccgaaatgtccaaacatccaggcctggtgctgatcctggggaagctgattcttcttcaccacgagcatccagagagaaagcgagcaccgcagacctatgagaaagaggaggatgaggacaagggggtggcctgcagcaaagatgagtggtggtgggactgcctcgaggtcttgagggataacacgttggtcacgttggccaacatttccgggcagctagacttgtctgcttacacggaaagcatctgcttgccaattttggatggcttgctgcactggatggtgtgcccgtctgcagaggcacaagatccctttccaactgtgggacccaactcggtcctgtcgcctcagagacttgtgctggagaccctctgtaaactcagtatccaggacaataatgtggacctgatcttggccactcctccatttagtcgtcaggagaaattctatgctacattagttaggtacgttggggatcgcaaaaacccagtctgtcgagaaatgtccatggcgcttttatcgaaccttgcccaaggggacgcactagcagcaagggccatagctgtgcagaaaggaagcattggaaacttgataagcttcctagaggatggggtcacgatggcccagtaccagcagagccagcacaacctcatgcacatgcagcccccgcccctggaaccacctagcgtagacatgatgtgcagggcggccaaggctttgctagccatggccagagtggacgaaaaccgctcggaattccttttgcacgagggccggttgctggatatctcgatatcagctgtcctgaactctctggttgcatctgtcatctgtgatgtactgtttcagattgggcagttatgacataagtgagaaggcaagcatgtgtgagtgaagattagagggtcacatataactggctgttttctgttcttgtttatccagcgtaggaagaaggaaaagaaaatctttgctcctctgccccattcactatttaccaattgggaattaaagaaataattaatttgaacagttatgaaattaatatttgctgtctgtgtgtataagtacatcctttggggttttttttttctcttttttttaaccaaagttgctgtctagtgcattcaaaggtcactttttgttcttcacagatctttttaatgttctttcccatgttgtattgcatttttgggggaagcaaattgactttaaagaaaaaagttgtggcaaaagatgctaagatgcgaaaatttcaccacactgagtcaaaaaggtgaaaaattatccatttcctatgcgttttactcctcagagaatgaaaaaaactgcatcccatcacccaaagttctgtgcaatagaaatttctacagatacaggtataggggctcaaggaggtatgtcggtcagtagtcaaaactatgaaatgatactggtttctccacaggaatatggttccattaggctgggagcaaaaacaatgttttttaagattgagaatacatacctgacaacgatccggaaactgctcctcaccactcccgtcatgcctgctgtcggcgtttgaccttccacgtgacagttcttcacaattcctttcatcattttttaaatattttttttactgcctatgggctgtgatgtatatagaagttgtacattaaacataccctcatttttttcttttcttttttttttttttttttagtacaaagttttagtttctttttcatgatgtggtaactacgaagtgatggtagatttaaataattttttatttttattttatatattttttcattagggccatatctccaaaaaaagaaagaaaaaatacaaaaaacaaaaacaaaaaaaaaagagggtaatgtacaagtttctgtatgtataaagtcatgctcgatttcaggagagcagctgatcacaatttgcttcatgaatcaaggtgtggaaatggttatatatggattgatttagaaaatggttaccagtacagtcaaaaaagagaaaatgaaaaaaatacaactaaaaggaagaaacacaacttcaaagatttttcagtgatgagaatccacatttgtatttcaagataatgtagtttaaaaaaaaaaaaaagaaaaaaacttgatgtaaattcctccttttcctctggcttaatgaatatcatttattcagtataaaatctttatatgttccacatgttaagaataaatgtacattaaatcttgttaagcactgtgatgggtgttcttgaatactgttctagtttccttaaagtggtttcctagtaatcaagttatttacaagaaataggggaatgcagcagtgtattcacattataaaaccctacatttggaagagacctttaggggttacctactttagagtggggagcaacagtttgattttctcaaattacttagctaattagtctttctttgaagcaattaactctaacgacattgaggtatgatcattttcagtatttatgggaggtggctgctgacccacttgaggtgagatctcagaagcttaactggcctgaaaatgtaacattctgccttttactaactccatcttagtttaatcaaagttcaatctattccttgtttcttctgtgtgcctcagagttattttgcatttagtttactccaccgtgtataatatttatactgtgcaatgttaaaaaagaatctgttatattgtatgtggtgtacatagtgcaaagtgatgatttctatttcagggcatattatggttctcatattccttcctacctggtgcacagtagctttttaatactagtcacttctaatttaaactttctcttcctgggtcattgactgttactgtgtaataatcgatttctttgaaactgctgcataattatgctgttagtggacctctacctcttctcttccctctcccaatcacagtatactcagaatccccagcccctcgcatacattgtgtcggttcacattactcacagtaatatatggaagagttagacaagaacatgcagttacagtcattgtgagacgtgactctccagtgtcacgaggaaaaaaatcatcttttctgcaaacagtctctcatctgtcaactcccacattactgagtcaaacagtcttcttacataacaatgcaaccaaatatatgttgaattaaagacccatttataattctgctttaaatacatctgcttgctaagaacagatttcagtgctccaagcttcaaatatggagatttgtaagagggaattcaatattattctaatttctctcttacagagtacaaataaaaggtgtatacaaactccgaacatatccagtattccaattcctttgtcaatcagaagagtaaaataattaacaaaagactgttgttatggtttgcattgtaaccgatacgcagagtctgaccgttgggcaacaagtttttctatcctgatgcgcaacacagtctctagagactaatccaggaagactttagcctcctttccatattctcacccccgaatcaagatttacagaagcccacgaagaatttacagcctgcttgagatcatcttgcctataaactgagttattgctttgtcctaaaaattagtcggtttttttttttctatgaggcttttcagaaatttacaggatgcccagactttacatgtgtaccaaaaaaaaaaaaaagataaaaaataaaggtgcaaagaaagtttagtattttggaatggtgctataaagttgaatctgttggtatttgagtggatttttttaatgtcacataagagatactgggcggcgtctgctcagcaatagctattcacagtgttttgttcgaggaagagaatgatatagaagcatgttttactgatgaaggtggcctgttcaaagactagttaagctgttttttcagagttataatgaagaatgatttttttaagggcatatgggcagtctcatacaatgtaagctattaactacctcctttatgaaaagaagccagcctttgccctgaagtccatccatttaaaactgttggaaatctttcatttcctatcaaaccacatgtacctgttcccatgtctgttcacctttgaggaagcaaagaaagtattataaatgagccacaaatggacagtgcaaacagtccctgttcttcttgctgagtgttggttcacttctttatttcgagggccgtggcccagctgcctgaagtcctgctcagcaccagcctagaagaacttggaagtaaacttcatggtcaggcaagattgttaaaaactctgatgaatacacttggtagcagcatttaatctgcgaacaggcaacattactcatgaatttaacagagatgtgttgagcacatgctatgtgcctggctctgttctaggctctgaggagtcctcaataaacaatgaccctgtttcaattatgttctagtcttccatgtcagacaattatagaaataaactagtcttccaaatacagtgttttacattgaaaacactcagaacgctccatgtttatgcactgaacactttttttatttttccaaagacagggtttagctctgtcacccaggctggagcacagtggcatgatcatagctcactgcagcctttaactcataggttcaagtgattctcccacctcagcttcccaagcagctgggtttacaggcatgtgccacgacgcccagctatttatttttaagaactttttgtagagatggggtcttgctatgttgccccagctggtctagatctcctggcctcaggccacctctgcttcccaaacctctgggattacagatatgagccaccatgcctggctgaaaacactcatttttgttaagaaataaaagtaagatactggctattgaggataagggggtgtgatgagatgagctctggactgaaaatcaaaaacacttaaaaggttaagtctcatctggggtgtggcctgtaggctcccaactgtgctctgcagttgtccaaggccctcccgtttaagagctgctcctgcagagcatacagttcctggcctgcccaggctcccgccagcacgctggtgagtcctgatgtggaaggaaaaagcagcagtggcttggtacccggtgctcccaggctccaccatcagcccttagaaatgcaggaactgactgcacctgtacaaaggccgtagtcaaggcctcctgaccccaagccccacgctgtcaggtgcatccacgtgcatctccaggcactgtgctagcgcttctacccttgctttctggtcctggtttggttttatgatgatccaagtcatgtcatcctctaaagtgccaaagtcaaattgctgagttaattcactttgggatttaaaatgatgaaaccctgagggaaagctggtggggctggaggtgggaggggcaaccgtcaagtgtgtcctaaacatgagactcatttgtcttcttcctgaatctgatttcagggacttaaagttttaccccagctttttccaaagtgtattctaagaaacagaagagatctccaaaaaatctccttatgtattctcttggcaatccatagtccatattgccatattaaagatagaaatcctgcagaagagacacctgttataatccaggcatttcctgacttaattaaccttggaattaaaaaaaaaaaaaaaaaaagcaattcctgaaaacatgctgcagagctttgggaaacaacttcatccaccagtgctcatgcctggccattgccccggactgaatgctccttgcattcttactcctgaaaccaaaattaagatgtcctcatgggaggagagaacatggaatcttctcttgctatctccacggccttgagccaggtacttaaattatttgaacctcagtttccttgtctgtaatatgggcatgacacccatctcaggggattggtaaggattaaatgagatgattaaaggccttgtcacatgtgaccggtgaatattaaccccaaacatccatccatccatacatatagacttctcctttggctggtgtcctaaaatgtgtttcacacaaagtccaagagaatagcttcccattttcataaccagtcacacagcttgtgtgactctttgttgctgtttttggtttatagtaaaacgtccctatgtccatctgacctctacatcccaccacccttacacccttgaatctgcctggtcttttaagggcttcagctggcggccactgccctccccagcccggcccaccctgcttgggttctgcaaaaccccccatgggttcggcctccagttcactcctcagatccccacatctttctgattgaggatcccattctgttgtacccatatttaaaattgcccgtcatctcaccaaggccagcttgattctgcataatttctctaccgaatgtcagttttgggtgtccaacaccctgcagtggtggaagatcgcacctttttcgcagacctgggggaagcaaatctctggactacagtcacacagtaaatttgctctgccctaccctgccctaacctaagaaagtgtcttgtaacaccttttaaaggtcagatgtggcaggtggccgaccacagtgtttaatttgatactccttttcatctgacacacagcagagagagcccctctaaagaaagagcactacggtcttcacgcgtagctggagatgggctgcagtgctgtgggctggagaagtgggattcacgatactcttcacttcctggtaggcttaaggtcaggtgaatcaatgaagcttgagccttgatctgcgtaagtttggtatttagctggcccgggatttgtatatttacaaactagattttcccccaagagttaaggaaccgaagcttggatgaagcttggatgcggctcctaaagatggtcttcaccaaacaaaagcgcttccttcaggcaagagccacagcatttgtcgagttgcctcctggtaagtggtgattacttcacatttggatgttttttgcacttgaaagaatttcatggctattagtggttcttcacagaagccttggtatggaacattatcacatccatcctccaaaaacagaagcagaggctgacgcccaaaataacatgccgagttagaaccaagccgagaccaagaatgtgtatgtacccaagatattttgcagctttacacaaaatctgggggagaccagggacttttaaaacagaagccgtgatgtacattggccacagttagagggagagaggggtctttcgttaattcttcattctagagatttaatgtcatatgctcagtttatgtctgtgcctatattaaaatgatactgtttcacccaaaatcgggatggtcctggcagcactctgtctttgcatagcaggctctgccaagggtctccttcctgctgtcatcctcgtaatcctccagagcttccctgcatgttttgaggaataaatgtcattatcatccctccctggtgtaagcagctcctgttacagggctcacacctgcaccacctctttgggcctcccttattctaatgcccaaggcttgtgtgaactcctatgagcaactcaagtttgagtccgtattcgacacacctactctcttgagtaaaattcctaaagcatgtcagacacattttctgctcaccacgatcttcaaatacaccacagaacttttattgaaattgtggtttcttcaaaaaatgatctgggcccatgggctttcataaatgatattttatgctggacatggtggctcatgcctataatcccaacatggtgggaggctgagacaggaggatcacttgaggccacaagttcatgaccagcctgagcaacatagtaagatgtctctccaaaaaaaataaaataaattaaccaggcatggtggcacacacctgtagtcccagctacttgggaggctgaggcaggagaattagttgtgcctaggagttcaaggctgcagtgagctatgattgcaccattgcactccagcctgtgcaacagagcaagaccctatctcagaaaaataataatgggcagggcgcagtggctcatgcctgtaatcccagcactttgggaggtcaaggtgggcagatcacttgaggtcaggagttcaagaccagcctgaccaacatggtaaaaccccttctgtattaaaaatacaaaaattagccaggtgtggtagcatgcacctataatcccagctactcatcaggctgaggcaggagactctggaacccaggaggcagaggttgcagtgagccaagatcgagccactgcactccagcctgggcaacagagcgagactctgtctaaagaaattttttttgaattaaaataaatgatgctttatgataaattagaattgtgctgctgtcagcattaaccaaaccctggccaccttaaagctgaaattcatagtcatccagggagtgggcctgtcccgcaggaattggtgtaacattccgctctgggtttagttaggtcttggaagcttcgctgacttggggctactattccacttaataaatggcctctagaacccctattggacaacgctcagggttctgattcaatattttcttccatgtttcagttttcattcatccattgagacttagaagaagacacttgaggaatgacaagtgacaaaggacatttggggaggacactagttgcttaggtttggctcatggctataaaaattcaggtctcataagacagcttatttgttcctatggggggaaagtgacgtggtatatcttacacatttaagatgaatacacttagcatgattttttaaaattacccataagtgcaatggttgttttgttggttcagtgtgtttttcaccaaatggtgtgaacatatggccagagcttctcttggccataagatctgaagggagaagagtccccatggcaaagagccatagtgatttatccagatgagtttcaattccaaaggggagcttagagtgaaggcctctcctagccaacttttcacacgcaatcccctctccccacatttaacattcaacttctgctgtgtgggtaataggagattggaatgcatctgggaaaacgaaaaatgggttttgttaatgagtggaagttcatcttggtgggccctgttttcaaatattaaatgtgatatattagtttgtgggcttggatttgatttgagcaatcaaatcttgataggaactggcatctcttcccacccacccagagtctgtctttagcagccgttgctgaatggtgagatctgtaagtgccatgaattgctttcagtctgatgcttgagaggcttgaacggggtattgaacttagatttttggagaacactccttaaagcctcttgcctggcttcctttatggcttttcagtagttgaaaagtgtattgttttttattttcaggatggtggggagctcctacctcttccccaaccctcatctccccccccagctcagcaaaggtactggggtgaggggtcattacccccagagcagccaaagggtgcaagacccagctctgtcttcttaggaggagtgggtctttgtcaaggggccctggttcagagcctgctcacctccacacctctgtctatgtcatccctgcagcatgacagtgggcaaagcatgagcacagtctagcatgtaatcagcattcagtaaaccatcgtgctttttcattctgaaagcaaataacaagcatcatcgtgtgactcgtggggccacacacgtcagcaggtaagacccatccatggtgatggcattgccgagatgtgcacagggtgctgtgggaggatccaggagagggggagcccaccccggctgggagggagcaacctgggaaggcttcctgcaggaagctgcctttggagacagagggctcatcatatgggagagagacagttggaagagatccctgggcattctggaatctcgaaacgtaagagttcagttgtgggttttgaaaggttctgagggaggagttggggcgggtgccccgcgtctctcctgagaagctggccttggcgagatgccgggcaattttaaatatgggtacaacagaatgggatcctcaatcagaaagatgcagggatctgaggagtgaactggagaccgaacccactgggggttttgcaaaacccaagcagggtgggccgggctggggagggcagtggccgccagctgaagcccttaaaagaccagacagattcaagggtgtgagggtggtgggatgtagaggtcaggtggacatagggacaaaagggaacggggggtcctggcgccggtcactgaaagtggtgctgctagtcacagagaggccagatccgaggaaggcctgggctgggcagccagcctcggggagggggtttgtctggcaggattagggcccggaggcgtccagaacctctgaaggcgctgagctggtggcagagggaagctgaggttgctcaccagcgggcctttgggaaagcagtggatcccctgctatccacgtgggcaaaaaagtaccccaagggtctttgggaagcggaagacagaggcggaagaggcggctcagagagacgacactgcacagcgagggccagagaggccacaggaaggttcatggccaagaaaccaggaaaggcaaggaaacaggctgtaccctagagccctggggggagtgcagctctgccccaccgtgatgctagcccgggaggcctgtgcctgacttgaagccaccagaactgtaagctcgtccacctgtgttgttttaagtcaccaaatttgtggtgatttgttgcagaagcaacaggacactgatagaggggctttttgagtctgtggtgcttataggatgtccgaggagaaccggtgagggagcggctgattgcaggggtctgggctcagcaggtggagagggttggtgtcatctccatagaggtggggagtgcggggtgagtggagacctgagggtgggagcagattgccagcaagagcgtggaaggggcgggctggaaagaggaggcaagaaggacaggacggagagggcgggtggggcactgggagaggccagggagcccatgttggcaccaagagccaaaggcttccaggagatgctgccacagggcccaggctgcaggacaggcccagatggcagcagagggttccctcgattctgcaatgggagctcatggaccatgcagatgacagggccagcgttgggtggaggggggggtggctgtgcagatgacagggccagcgtcgggggttgctgcccttgcccaccttcagggcctgctatgaaaggctgctccatggacacgccctttgagatgcttctcaggacaggggctcaggatcccccgtgcccagctcactcctgctcgggaaagcctgccccaccagcgaccttgcctctcctcatgcatgaaaatcatcctactttgctcttcacaaaagtgtgggtggagaaaacggccttcaacactcctcagagcacctcctcggagcggaagctgcttcctggggtgtgtttctgttctggaggttgcaccttcgatcctgaggcgtgggagctggcctgaggttgaaggtgaggctgaggacctgggtgaggctccccaaggcccccggctgggctgagcaaagaacgggagcgtgcccccaccactcacagggtgtccacacctggagaaggaaaccacaggctttgtcacctttgtcttaagtcagtgggacaaacctagaaagtgaggcattttggacagctccaaggtggctgtgtcctggcctgcccagaccgagggccccgggattctggaggcgcagattggatcccaggatgcatgactagtgactcctaaggtgggaacccctgggtgagcgaggagtgggaggccggtgcacatccaccttctgtcccggcctcctcttccgccggtcctgtatttctctcgaagtctcatcccggccatcagagcctcaagacttctcaagctcctggcacattctgaggtaagcacctaggttgatggtggccttctctccacacacagcacagccacgctggggagtgggggccggtgaatggcctggggacaggccacaagcaggcctaggtgggggtgccctggcctgctgtcccctccacccctgtcctgggagcctgtctgcaccagcacagaaagaatatcacggctgtcacccacagggcctagcagccgggtttttctcaccaagagctcgtgtggagagggacgcaacatgtttcccttttatgaggctgctccctgtccccaaaggtggggctgacgggtgttcctgggaaatgagagcctgccctgccctttccccggggctccctcgtccatgctcagcctcccagaagcccctcctgctgagttgcccacagccctccctgccggcctggcctctccttgcagctcttcctcttctcatgaaggtgtgtggaggttggggtttgcgctctctcttccttgattaaccttgccagaggcttgtctgttgcagagaacccgctctcagtgtcattgataccactcgctctgagtcatgaatttctcagcttaccctttcttctccttccctctagtttagtttgttctttactatcctgcttcttaattacaacatttattttcatttctgttgaattttgtaaaacacattccagttatcagttttccccagggaacagtggctcacgtctgtaatctcagctctttgggaggctgaggcaggaggatcacttgagcccaggaattccagaacagcctgagcaatatagtgagacccccatcttcacaaataatttaaaacttagctgagcatggcggcgtgtgcctgtagttccagctgctcaggaggatgggacgggaggatcgcttaagcccaagcagtggaagctgcagtgagcagtgatggcaccgttgcactccaacctgggtgaccgagtgagaccctgtctcaaaaacaagacaaaaaaaataccagttttcttctcagaacattcctatgccatgactgttgttttataaaaacccacaatggctgtgttcttttcctctcctactcatgattttttttggaggctcttttagtttgaaataggttttatttttccctgtttttccttgtactattgaattttagttttattgcattattatcacaacatggcttatataatttctatatttgatcacttttcatctcttatttcttccatcattacttctctgctcacgcttgccttctggaatctccaggaatacccaacagatattttgcgttcttgcctttttcttgtcttgttatttattattttcgcctctttatcttttcttctgggtgctcagagaatttctagagtcattagtttagctatctgttatatccaatatgctgttcatggcttctgttgagctgaaaaaccaatgagtaattaatgttttacttctaaaaacaatattttttatttatatatttgtgcatatcttggtataaaacaatattttaaagtctcaaattgttctcttctacttttagagacagggtctctctctgtcactcaggctgt

SEQ ID NO: 875 - DNA, 1428 bp, Homo sapiens
gcggccgcgcaacaaaggagtcacccggcgatgagccccggcacccccggaccgaccatgggcagatcccagggcagcccaatggatccaatggtgatgaagagacctcagttgtatggcatgggcagtaaccctcattctcagcctcagcagagcagtccgtacccaggaggttcctatggccctccaggcccacagcggtatccaattggcatccagggtcggactcccggggccatggccggaatgcagtaccctcagcagcagatgccacctcagtatggacagcaaggtgtgagtggttactgccagcagggccaacagccatattacagccagcagccgcagcccccgcacctcccaccccaggcgcagtatctgccgtcccagtcccagcagaggtaccagccgcagcaggacatgtctcaggaaggctatggaactagatctcaacctcctctggcccccggaaaacctaaccatgaagacttgaacttaatacagcaagaaagaccatcaagtttaccagatctgtctggctccattgatgacctccccacgggaacggaagcaactttgagctcagcagtcagtgcatccgggtccacgagcagccaaggggatcagagcaacccggcgcagtcgcctttctccccacatgcgtcccctcatctctccagcatcccggggggcccatctccctctcctgttggctctcctgtaggaagcaaccagtctcgatctggcccaatctctcctgcaagtatcccaggtagtcagatgcctccgcagccacccgggagccagtcagaatccagttcccatcccgccttgagccagtcaccaatgccacaggaaagaggttttatggcaggcacacaaagaaaccctcagatggctcagtatggacctcaacagacaggaccatccatgtcgcctcatccttctcctgggggccagatgcatgctggaatcagtagctttcagcagagtaactcaagtgggacttacggtccacagatgagccagtatggaccacaaggtaactactccagacccccagcgtatagtggggtgcccagtgcaagctacagcggcccagggcccggtatgggtatcagtgccaacaaccagatgcatggacaagggccaagccagccatgtggtgctgtgcccctgggacgaatgccatcagctgggatgcagaacagaccatttcctggaaatatgagcagcatgacccccagttctcctggcatgtctcagcagggagggccaggaatggggccgccaatgccaactgtgaaccgtaaggcacaggaggcagccgcagcagtgatgcaggctgctgcgaactcagcacaaagcaggtacgccacccaggagcacgccccgggcaggtacgctgtgtgtctacccgtgaccacg

SEQ ID NO: 876 - protein, 464 aa, Homo sapiens
MSPGTPGPTMGRSQGSPMDPMVMKRPQLYGMGSNPHSQPQQSSPYPGGSYGPPGPQRYPIGIQGRTPGAMAGMQYPQQQMPPQYGQQGVSGYCQQGQQPYYSQQPQPPHLPPQAQYLPSQSQQRYQPQQDMSQEGYGTRSQPPLAPGKPNHEDLNLIQQERPSSLPDLSGSIDDLPTGTEATLSSAVSASGSTSSQGDQSNPAQSPFSPHDHLSSIPGGPSPSPVGSPVGSNQSRSGPISPASIPGSQMPPQPPGSQSESSSHPALSQSPMPQERGFMAGTQRNPQMAQYGPQQTGPSMSPHPSPGGQMHAGISSFQQSNSSGTYGPQMSQYGPQGNYSRPPAYSGVPSASYSGPGPGMGISANNQMHGQGPSQPCGAVPLGRMPSAGMQNRPFPGNMSSMTPSSPGMSQQGGPGMGPPMPTVNRKAQEAAAAVMQAAANSAQSRYATQEHAPGRYAVCLPVTT

SEQ ID NO: 877 - DNA, 1416 bp, Homo sapiens
atgggcttgggcaaggacatgggcgcccagtacgccgctgccagcccggcctgggcggccgcgcaacaaaggagtcacccggcgatgagccccggcacccccggaccgaccatgggcagatcccaggcccgggaacgcgaagcgagatcccgaggcgccacccgcgcggtcgccgtttggggcggcggggaccgttcgggtgcttttgtaacaaataggctctcccggccaggacggctggggcgaagagccacccgatcggttctgggagcgcccacaatgtgctttaacgggggaaagaatgaggaactttctcccacctttagccacagcacgttccctcttggcttccgaggtccaggcagggaaaatagtacattacttcctctcaattctaactttggggtaatcctcatagagtttgaggatctctttggagatgtgtattacaaagggaaactccctaccattatctgggtcattgctccctaccaccgtctgggtcattgcatagttacccagggtggccgtgaactagtcagcagccatttagaggaaagcctgcttggcttggctggttcaggaggcggaggctgctgcagggcctgggaaggagtaaggcagcacacggtggctgttaggtcatttgtgttggatgaaagagagttggtgcacagactggacggtgtctcagattcgctggggtttacgagtccagaaatccatgagtccgaggaagtgggaagagagaataagggaagggaggccggaagcatctcagctaacaggaagctgggagaaagttcagatctatggagtggaagagcccagggtgaagggagccagcggatcacgtggtgtcggaaacgccttaagcaagaagcttgcatgtcagaaaccaagctcagggcttctggagaatgtgagagcaccaacaccaatattttgcacagcagcaggtcttatgtgggaggggcaagagctggaagtgcgtcttccgtttacagggcagccacagctgtgctgggtacagagtgttctagaaatgggtttggagttgtgtgctcaggcatcggcttggtggtgcataagagggctgtccagggcagcccaatggatccaatggtgatgaagagacctcagttgtatggcatgggcagtaaccctcattctcagcctcagcagagcagtccgtacccaggaggttcctatggccctccaggcccacagcggtatccaattggcatccagggtcggactcccggggccatggccggaatgcagtaccctcagcagcagttgttcagtcctgtactagtcatggggaaataccaagacagccgtaactggggctttgctccagaggaccacggcagggacactctgcaaagagatatgctgagtagtgcgcacagg

SEQ ID NO: 878 - protein, 470 aa, Homo sapiens
MGLGKDMGAQYAADAWAAAQQRSHPAMSPGTPGPTMGRSQAREREARSRGATRAVAVWGGGDRSGAFVTNRLSRPGRLGRRATRSVLGAPTMCFNGGKNEELSPTFSHSTFPLGFRGPGRENSTLLPLNSNFGVILIEFEDLFGDVYYKGKLPTIIWVIAPYHRLGHCIVTQGGRELVSSHLEESLLGLAGSGGGGCCRAWEGVRQHTVAVRSFVLDERELVHRLDGVSDSLGFTSPEIHESEEVGRENKGREAGSISANRKLGESSDLWSGRAQGEGSQRITWCRKRLKQEACMSETKLRASGECESTNTNILHSSRSYVGGARAGSASSVYRAATAVLGTECSRNGFGVVCSGIGLVVHKRAVQGSPMDPMVMKRPQLYGMGSNPHSQPQQSSPYPGGSYGPPGPQRYPIGIQGRTPGAMAGMQYPQQQLFSPVLVMGKYQDSRNWGFAPEDHGRDTLQRDMLSSAHR

SEQ ID NO: 879 - DNA, 8026 bp, Homo sapiens
gcggccgcgcaacaaaggagtcacccggcgatgagccccggcacccccggaccgaccatgggcagatcccagggcagcccaatggatccaatggtgatgaagagacctcagttgtatggcatgggcagtaaccctcattctcagcctcagcagagcagtccgtacccaggaggttcctatggccctccaggcccacagcggtatccaattggcatccagggtcggactcccggggccatggccggaatgcagtaccctcagcagcaggactctggagatgccacatggaaagaaacattctggttgatgccacctcagtatggacagcaaggtgtgagtggttactgccagcagggccaacagccatattacagccagcagccgcagcccccgcacctcccaccccaggcgcagtatctgccgtcccagtcccagcagaggtaccagccgcagcaggacatgtctcaggaaggctatggaactagatctcaacctcctctggcccccggaaaacctaaccatgaagacttgaacttaatacagcaagaaagaccatcaagtttaccagatctgtctggctccattgatgacctccccacgggaacggaagcaactttgagctcagcagtcagtgcatccgggtccacgagcagccaaggggatcagagcaacccggcgcagtcgcctttctccccacatgcgtcccctcatctctccagcatcccggggggcccatctccctctcctgttggctctcctgtaggaagcaaccagtctcgatctggcccaatctctcctgcaagtatcccaggtagtcagatgcctccgcagccacccgggagccagtcagaatccagttcccatcccgccttgagccagtcaccaatgccacaggaaagaggttttatggcaggcacacaaagaaaccctcagatggctcagtatggacctcaacagacaggaccatccatgtcgcctcatccttctcctgggggccagatgcatgctggaatcagtagctttcagcagagtaactcaagtgggacttacggtccacagatgagccagtatggaccacaaggtaactactccagacccccagcgtatagtggggtgcccagtgcaagctacagcggcccagggcccggtatgggtatcagtgccaacaaccagatgcatggacaagggccaagccagccatgtggtgctgtgcccctgggacgaatgccatcagctgggatgcagaacagaccatttcctggaaatatgagcagcatgacccccagttctcctggcatgtctcagcagggagggccaggaatggggccgccaatgccaactgtgaaccgtaaggcacaggaggcagccgcagcagtgatgcaggctgctgcgaactcagcacaaagcaggcaaggcagtttccccggcatgaaccagagtggacttatggcttccagctctccctacagccagcccatgaacaacagctctagcctgatgaacacgcaggcgccgccctacagcatggcgcccgccatggtgaacagctcggcagcatctgtgggtcttgcagatatgatgtctcctggtgaatccaaactgcccctgcctctcaaagcagacggcaaagaagaaggcactccacagcccgagagcaagtcaaagaagtccagctcctccaccactactggggagaagatcacgaaggtgtacgagctggggaatgagccagagagaaagctctgggtcgaccgatacctcaccttcatggaagagagaggctctcctgtctcaagtctgcctgccgtgggcaagaagcccctggacctgttccgactctacgtctgcgtcaaagagatcgggggtttggcccaggttaataaaaacaagaagtggcgtgagctggcaaccaacctaaacgttggcacctcaagcagtgcagcgagctccctgaaaaagcagtatattcagtacctgtttgcctttgagtgcaagatcgaacgtggggaggagcccccgccggaagtcttcagcaccggggacaccaaaaagcagcccaagctccagccgccatctcctgctaactcgggatccttgcaaggcccacagaccccccagtcaactggcagcaattccatggcagaggttccaggtgacctgaagccacctaccccagcctccacccctcacggccagatgactccaatgcaaggtggaagaagcagtacaatcagtgtgcacgacccattctcagatgtgagtgattcatccttcccgaaacggaactccatgactccaaacgccccctaccagcagggcatgagcatgcccgatgtgatgggcaggatgccctatgagcccaacaaggacccctttgggggaatgagaaaagtgcctggaagcagcgagccctttatgacgcaaggacagatgcccaacagcagcatgcaggacatgtacaaccaaagtccctccggagcaatgtctaacctgggcatggggcagcgccagcagtttccctatggagccagttacgaccgaaggcatgaaccttatgggcagcagtatccaggccaaggccctccctcgggacagccgccgtatggagggcaccagcccggcctgtacccacagcagccgaattacaaacgccatatggacggcatgtacgggcccccagccaagcgccacgagggcgacatgtacaacatgcagtacagcagccagcagcaggagatgtacaaccagtatggaggctcctactcgggcccggaccgcaggcccatccagggccagtacccgtatccctacagcagggagaggatgcagggcccggggcagatccagacacacggaatcccgcctcagatgatgggcggcccgctgcagtcgtcctccagtgaggggcctcagcagaatatgtgggcagcacgcaatgatatgccttatccctaccagaacaggcagggccctggcggccctacacaggcgcccccttacccaggcatgaaccgcacagacgatatgatggtacccgatcagaggataaatcatgagagccagtggccttctcacgtcagccagcgtcagccttatatgtcgtcctcagcctccatgcagcccatcacacgcccaccacagccgtcctaccagacgccaccgtcactgccaaatcacatctccagggcgcccagcccagcgtccttccagcgctccctggagaaccgcatgtctccaagcaagtctccttttctgccgtctatgaagatgcagaaggtcatgcccacggtccccacatcccaggtcaccgggccaccaccccaaccacccccaatcagaagggagatcacctttcctcctggctcagtagaagcatcacaaccagtcttgaaacaaaggcgaaagattacctccaaagatatcgttactcctgaggcgtggcgtgtgatgatgtcccttaaatcaggtcttttggctgagagtacgtgggctttggacactattaatattcttctgtatgatgacagcactgttgctactttcaatctctcccagttgtctggatttctcgaacttttagtcgagtactttagaaaatgcctgattgacatttttggaattcttatggaatatgaagtgggagaccccagccaaaaagcacttgatcacaacgcagcaaggaaggatgacagccagtccttggcagacgattctgggaaagaggaggaagatgctgaatgtattgatgacgacgaggaagacgaggaggatgaggaggaagacagcgagaagacagaaagcgatgaaaagagcagcatcgctctgactgccccggacgccgctgcagacccaaaggagaagcccaagcaagccagtaagttcgacaagctgccaataaagatagtcaaaaagaacaacctgtttgttgttgaccgatctgacaagttggggcgtgtgcaggagttcaatagtggccttctgcactggcagctcggcgggggtgacaccaccgagcacattcagactcactttgagagcaagatggaaattcctcctcgcaggcgcccacctccccccttaagctccgcaggtagaaagaaagagcaagaaggcaaaggcgactctgaagagcagcaagagaaaagcatcatagcaaccatcgatgacgtcctctctgctcggccaggggcattgcctgaagacgcaaaccctgggccccagaccgaaagcagtaagtttccctttggtatccagcaagccaaaagtcaccggaacatcaagctgctggaggacgagcccaggagccgagacgagactcctctgtgtaccatcgcgcactggcaggactcgctggctaagcgatgcatctgtgtgtccaatattgtccgtagcttgtcattcgtgcctggcaatgatgccgaaatgtccaaacatccaggcctggtgctgatcctggggaagctgattcttcttcaccacgagcatccagagagaaagcgagcaccgcagacctatgagaaagaggaggatgaggacaagggggtggcctgcagcaaagatgagtggtggtgggactgcctcgaggtcttgagggataacacgttggtcacgttggccaacatttccgggcagctagacttgtctgcttacacggaaagcatctgcttgccaattttggatggcttgctgcactggatggtgtgcccgtctgcagaggcacaagatccctttccaactgtgggacccaactcggtcctgtcgcctcagagacttgtgctggagaccctctgtaaactcagtatccaggacaataatgtggacctgatcttggccactcctccatttagtcgtcaggagaaattctatgctacattagttaggtacgttggggatcgcaaaaacccagtctgtcgagaaatgtccatggcgcttttatcgaaccttgcccaaggggacgcactagcagcaagggccatagctgtgcagaaaggaagcattggaaacttgataagcttcctagaggatggggtcacgatggcccagtaccagcagagccagcacaacctcatgcacatgcagcccccgcccctggaaccacctagcgtagacatgatgtgcagggcggccaaggctttgctagccatggccagagtggacgaaaaccgctcggaattccttttgcacgagggccggttgctggatatctcgatatcagctgtcctgaactctctggttgcatctgtcatctgtgatgtactgtttcagattgggcagttatgacataagtgagaaggcaagcatgtgtgagtgaagattagagggtcacatataactggctgttttctgttcttgtttatccagcgtaggaagaaggaaaagaaaatctttgctcctctgccccattcactatttaccaattgggaattaaagaaataattaatttgaacagttatgaaattaatatttgctgtctgtgtgtataagtacatcctttggggttttttttttctcttttttttaaccaaagttgctgtctagtgcattcaaaggtcactttttgttcttcacagatctttttaatgttctttcccatgttgtattgcatttttgggggaagcaaattgactttaaagaaaaaagttgtggcaaaagatgctaagatgcgaaaatttcaccacactgagtcaaaaaggtgaaaaattatccatttcctatgcgttttactcctcagagaatgaaaaaaactgcatcccatcacccaaagttctgtgcaatagaaatttctacagatacaggtataggggctcaaggaggtatgtcggtcagtagtcaaaactatgaaatgatactggtttctccacaggaatatggttccattaggctgggagcaaaaacaatgttttttaagattgagaatacatacctgacaacgatccggaaactgctcctcaccactcccgtcatgcctgctgtcggcgtttgaccttccacgtgacagttcttcacaattcctttcatcattttttaaatattttttttactgcctatgggctgtgatgtatatagaagttgtacattaaacataccctcatttttttcttttcttttttttttttttttttagtacaaagttttagtttctttttcatgatgtggtaactacgaagtgatggtagatttaaataattttttatttttattttatatattttttcattagggccatatctccaaaaaaagaaagaaaaaatacaaaaaacaaaaacaaaaaaaaaagagggtaatgtacaagtttctgtatgtataaagtcatgctcgatttcaggagagcagctgatcacaatttgcttcatgaatcaaggtgtggaaatggttatatatggattgatttagaaaatggttaccagtacagtcaaaaaagagaaaatgaaaaaaatacaactaaaaggaagaaacacaacttcaaagatttttcagtgatgagaatccacatttgtatttcaagataatgtagtttaaaaaaaaaaaaaagaaaaaaacttgatgtaaattcctccttttcctctggcttaatgaatatcatttattcagtataaaatctttatatgttccacatgttaagaataaatgtacattaaatcttgttaagcactgtgatgggtgttcttgaatactgttctagtttccttaaagtggtttcctagtaatcaagttatttacaagaaataggggaatgcagcagtgtattcacattataaaaccctacatttggaagagacctttaggggttacctactttagagtggggagcaacagtttgattttctcaaattacttagctaattagtctttctttgaagcaattaactctaacgacattgaggtatgatcattttcagtatttatgggaggtggctgctgacccacttgaggtgagatctcagaagcttaactggcctgaaaatgtaacattctgccttttactaactccatcttagtttaatcaaagttcaatctattccttgtttcttctgtgtgcctcagagttattttgcatttagtttactccaccgtgtataatatttatactgtgcaatgttaaaaaagaatctgttatattgtatgtggtgtacatagtgcaaagtgatgatttctatttcagggcatattatggttctcatattccttcctacctggtgcacagtagctttttaatactagtcacttctaatttaaactttctcttcctgggtcattgactgttactgtgtaataatcgatttctttgaaactgctgcataattatgctgttagtggacctctacctcttctcttccctctcccaatcacagtatactcagaatccccagcccctcgcatacattgtgtcggttcacattactcacagtaatatatggaagagttagacaagaacatgcagttacagtcattgtgagacgtgactctccagtgtcacgaggaaaaaaatcatcttttctgcaaacagtctctcatctgtcaactcccacattactgagtcaaacagtcttcttacataacaatgcaaccaaatatatgttgaattaaagacccatttataattctgctttaaatacatctgcttgctaagaacagatttcagtgctccaagcttcaaatatggagatttgtaagagggaattcaatattattctaatttctctcttacagagtacaaataaaaggtgtatacaaactccgaacatatccagtattccaattcctttgtcaatcagaagagtaaaataattaacaaaagactgttgttatggtttgcattgtaaccgatacgcagagtctgaccgttgggcaacaagtttttctatcctgatgcgcaacacagtctctagagactaatccaggaagactttagcctcctttccatattctcacccccgaatcaagatttacagaagcccacgaagaatttacagcctgcttgagatcatcttgcctataaactgagttattgctttgtcctaaaaat

SEQ ID NO: 880 - protein, 1739 aa, Homo sapiens
MSPGTPGPTMGRSQGSPMDPMVMKRPQLYGMGSNPHSQPQQSSPYPGGSYGPPGPQRYPIGIQGRTPGAMAGMQYPQQQDSGDATWKETFWLMPPQYGQQGVSGYCQQGQQPYYSQQPQPPHLPPQAQYLPSQSQQRYQPQQDMSQEGYGTRSQPPLAPGKPNHEDLNLIQQERPSSLPDLSGSIDDLPTGTEATLSSAVSASGSTSSQGDQSNPAQSPFSPHDHLSSIPGGPSPSPVGSPVGSNQSRSGPISPASIPGSQMPPQPPGSQSESSSHPALSQSPMPQERGFMAGTQRNPQMAQYGPQQTGPSMSPHPSPGGQMHAGISSFQQSNSSGTYGPQMSQYGPQGNYSRPPAYSGVPSASYSGPGPGMGISANNQMHGQGPSQPCGAVPLGRMPSAGMQNRPFPGNMSSMTPSSPGMSQQGGPGMGPPMPTVNRKAQEAAAAVMQAAANSAQSRQGSFPGMNQSGLMASSSPYSQPMNNSSSLMNTQAPPYSMAPAMVNSSAASVGLADMMSPGESKLPLPLKADGKEEGTPQPESKSKKSSSSTTTGEKITKVYELGNEPERKLWVDRYLTFMEERGSPVSSLPAVGKKPLDLFRLYVCVKEIGGLAQVNKNKKWRELATNLNVGTSSSAASSLKKQYIQYLFAFECKIERGEEPPPEVFSTGDTKKQPKLQPPSPANSGSLQGPQTPQSTGSNSMAEVPGDLKPPTPASTPHGQMTPMQGGRSSTISVHDPFSDVSDSSFPKRNSMTPNAPYQQGMSMPDVMGRMPYEPNKDPFGGMRKVPGSSEPFMTQGQMPNSSMQDMYNQSPSGAMSNLGMGQRQQFPYGASYDRRHEPYGQQYPGQGPPSGQPPYGGHQPGPQQPNYKRHMDGMYGPPAKRHEGDMYNMQYSSQQQEMYNQYGGSYSGPDRRPIQGQYPYPYSRERMQGPGQIQTHGIPPQMMGGPLQSSSSEGPQQNMWAARNDMPYPYQNRQGPGGPTQAPPYPGMNRTDDMMVPDQRINHESQWPSHVSQRQPYMSSSASMQPIWPQPSYQTPPSLPNHRAPSPASFQRSLENRMSPSKSPFLPSMKMQKVMPTVPTSQVTGPPPQPPPIRREITFPPGSVEASQPVLKQRRKITSKDIVTPEAWRVMMSLKSGLLAESTWALDTINILLYDDSTVATFNLSQLSGFLELLVEYFRKCLIDIFGILMEYEVGDPSQKALDHNAARKDDSQSLADDSGKEEEDAECIDDDEEDEEDEEEDSEKTESDEKSSIALTAPDAAADPKEKPKQASKFDKLPIKIVKKNNLFVVDRSDKLGRVQEFNSGLLHWQLGGGDTTEHIQTHFESKMEIPPRRRPPPPLSSAGRKKEQEGKGDSEEQQEKSIIATIDDVLSARPGALPEDANPGPQTESSKFPFGIQQAKSHRNIKLLEDEPRSRDETPLCTIAHWQDSLAKRCICVSNIVRSLSFVPGNDAEMSKHPGLVLILGKLILLHHEHPERKRAPQTYEKEEDEDKGVACSKDEWWWDCLEVLRDNTLVTLANISGQLDLSAYTESICLPILDGLLHWMVCPSAEAQDPFPTVGPNSVLSPQRLVLETLCKLSIQDNNVDLILATPPFSRQEKFYATLVRYVGDRKNPVCREMSMALLSNLAQGDAARAIAVQKGSIGNLISFLEDGVTMAQYQQSQHNLMHMQPPPLEPPSVDMMCRAAKALLAMARVDENRSEFLLHEGRLLDISISAVLNSLVASVICDVLFQIGQL

SEQ ID NO: 881 - DNA, 8146 bp, Homo sapiens
gcggccgcgcaacaaaggagtcacccggcgatgagccccggcacccccggaccgaccatgggcagatcccagggcagcccaatggatccaatggtgatgaagagacctcagttgtatggcatgggcagtaaccctcattctcagcctcagcagagcagtccgtacccaggaggttcctatggccctccaggcccacagcggtatccaattggcatccagggtcggactcccggggccatggccggaatgcagtaccctcagcagcagatgccacctcagtatggacagcaaggtgtgagtggttactgccagcagggccaacagccatattacagccagcagccgcagcccccgcacctcccaccccaggcgcagtatctgccgtcccagtcccagcagaggtaccagccgcagcaggacatgtctcaggaaggctatggaactagatctcaacctcctctggcccccggaaaacctaaccatgaagacttgaacttaatacagcaagaaagaccatcaagtttaccagatctgtctggctccattgatgacctccccacgggaacggaagcaactttgagctcagcagtcagtgcatccgggtccacgagcagccaaggggatcagagcaacccggcgcagtcgcctttctccccacatgcgtcccctcatctctccagcatcccggggggcccatctccctctcctgttggctctcctgtaggaagcaaccagtctcgatctggcccaatctctcctgcaagtatcccaggtagtcagatgcctccgcagccacccgggagccagtcagaatccagttcccatcccgccttgagccagtcaccaatgccacaggaaagaggttttatggcaggcacacaaagaaaccctcagatggctcagtatggacctcaacagacaggaccatccatgtcgcctcatccttctcctgggggccagatgcatgctggaatcagtagctttcagcagagtaactcaagtgggacttacggtccacagatgagccagtatggaccacaaggtaactactccagacccccagcgtatagtggggtgcccagtgcaagctacagcggcccagggcccggtatgggtatcagtgccaacaaccagatgcatggacaagggccaagccagccatgtggtgctgtgcccctgggacgaatgccatcagctgggatgcagaacagaccatttcctggaaatatgagcagcatgacccccagttctcctggcatgtctcagcagggagggccaggaatggggccgccaatgccaactgtgaaccgtaaggcacaggaggcagccgcagcagtgatgcaggctgctgcgaactcagcacaaagcaggcaaggcagtttccccggcatgaaccagagtggacttatggcttccagctctccctacagccagcccatgaacaacagctctagcctgatgaacacgcaggcgccgccctacagcatggcgcccgccatggtgaacagctcggcagcatctgtgggtcttgcagatatgatgtctcctggtgaatccaaactgcccctgcctctcaaagcagacggcaaagaagaaggcactccacagcccgagagcaagtcaaaggatagctacagctctcagggtatttctcagcccccaaccccaggcaacctgccagtcccttccccaatgtcccccagctctgctagcatctcctcatttcatggagatgaaagtgatagcattagcagcccaggctggccaaagactccatcaagccctaagtccagctcctccaccactactggggagaagatcacgaaggtgtacgagctggggaatgagccagagagaaagctctgggtcgaccgatacctcaccttcatggaagagagaggctctcctgtctcaagtctgcctgccgtgggcaagaagcccctggacctgttccgactctacgtctgcgtcaaagagatcgggggtttggcccaggttaataaaaacaagaagtggcgtgagctggcaaccaacctaaacgttggcacctcaagcagtgcagcgagctccctgaaaaagcagtatattcagtacctgtttgcctttgagtgcaagatcgaacgtggggaggagcccccgccggaagtcttcagcaccggggacaccaaaaagcagcccaagctccagccgccatctcctgctaactcgggatccttgcaaggcccacagaccccccagtcaactggcagcaattccatggcagaggttccaggtgacctgaagccacctaccccagcctccacccctcacggccagatgactccaatgcaaggtggaagaagcagtacaatcagtgtgcacgacccattctcagatgtgagtgattcatccttcccgaaacggaactccatgactccaaacgccccctaccagcagggcatgagcatgcccgatgtgatgggcaggatgccctatgagcccaacaaggacccctttgggggaatgagaaaagtgcctggaagcagcgagccctttatgacgcaaggacagatgcccaacagcagcatgcaggacatgtacaaccaaagtccctccggagcaatgtctaacctgggcatggggcagcgccagcagtttccctatggagccagttacgaccgaaggcatgaaccttatgggcagcagtatccaggccaaggccctccctcgggacagccgccgtatggagggcaccagcccggcctgtacccacagcagccgaattacaaacgccatatggacggcatgtacgggcccccagccaagcgccacgagggcgacatgtacaacatgcagtacagcagccagcagcaggagatgtacaaccagtatggaggctcctactcgggcccggaccgcaggcccatccagggccagtacccgtatccctacagcagggagaggatgcagggcccggggcagatccagacacacggaatcccgcctcagatgatgggcggcccgctgcagtcgtcctccagtgaggggcctcagcagaatatgtgggcagcacgcaatgatatgccttatccctaccagaacaggcagggccctggcggccctacacaggcgcccccttacccaggcatgaaccgcacagacgatatgatggtacccgatcagaggataaatcatgagagccagtggccttctcacgtcagccagcgtcagccttatatgtcgtcctcagcctccatgcagcccatcacacgcccaccacagccgtcctaccagacgccaccgtcactgccaaatcacatctccagggcgcccagcccagcgtccttccagcgctccctggagaaccgcatgtctccaagcaagtctccttttctgccgtctatgaagatgcagaaggtcatgcccacggtccccacatcccaggtcaccgggccaccaccccaaccacccccaatcagaagggagatcacctttcctcctggctcagtagaagcatcacaaccagtcttgaaacaaaggcgaaagattacctccaaagatatcgttactcctgaggcgtggcgtgtgatgatgtcccttaaatcaggtcttttggctgagagtacgtgggctttggacactattaatattcttctgtatgatgacagcactgttgctactttcaatctctcccagttgtctggatttctcgaacttttagtcgagtactttagaaaatgcctgattgacatttttggaattcttatggaatatgaagtgggagaccccagccaaaaagcacttgatcacaacgcagcaaggaaggatgacagccagtccttggcagacgattctgggaaagaggaggaagatgctgaatgtattgatgacgacgaggaagacgaggaggatgaggaggaagacagcgagaagacagaaagcgatgaaaagagcagcatcgctctgactgccccggacgccgctgcagacccaaaggagaagcccaagcaagccagtaagttcgacaagctgccaataaagatagtcaaaaagaacaacctgtttgttgttgaccgatctgacaagttggggcgtgtgcaggagttcaatagtggccttctgcactggcagctcggcgggggtgacaccaccgagcacattcagactcactttgagagcaagatggaaattcctcctcgcaggcgcccacctccccccttaagctccgcaggtagaaagaaagagcaagaaggcaaaggcgactctgaagagcagcaagagaaaagcatcatagcaaccatcgatgacgtcctctctgctcggccaggggcattgcctgaagacgcaaaccctgggccccagaccgaaagcagtaagtttccctttggtatccagcaagccaaaagtcaccggaacatcaagctgctggaggacgagcccaggagccgagacgagactcctctgtgtaccatcgcgcactggcaggactcgctggctaagcgatgcatctgtgtgtccaatattgtccgtagcttgtcattcgtgcctggcaatgatgccgaaatgtccaaacatccaggcctggtgctgatcctggggaagctgattcttcttcaccacgagcatccagagagaaagcgagcaccgcagacctatgagaaagaggaggatgaggacaagggggtggcctgcagcaaagatgagtggtggtgggactgcctcgaggtcttgagggataacacgttggtcacgttggccaacatttccgggcagctagacttgtctgcttacacggaaagcatctgcttgccaattttggatggcttgctgcactggatggtgtgcccgtctgcagaggcacaagatccctttccaactgtgggacccaactcggtcctgtcgcctcagagacttgtgctggagaccctctgtaaactcagtatccaggacaataatgtggacctgatcttggccactcctccatttagtcgtcaggagaaattctatgctacattagttaggtacgttggggatcgcaaaaacccagtctgtcgagaaatgtccatggcgcttttatcgaaccttgcccaaggggacgcactagcagcaagggccatagctgtgcagaaaggaagcattggaaacttgataagcttcctagaggatggggtcacgatggcccagtaccagcagagccagcacaacctcatgcacatgcagcccccgcccctggaaccacctagcgtagacatgatgtgcagggcggccaaggctttgctagccatggccagagtggacgaaaaccgctcggaattccttttgcacgagggccggttgctggatatctcgatatcagctgtcctgaactctctggttgcatctgtcatctgtgatgtactgtttcagattgggcagttatgacataagtgagaaggcaagcatgtgtgagtgaagattagagggtcacatataactggctgttttctgttcttgtttatccagcgtaggaagaaggaaaagaaaatctttgctcctctgccccattcactatttaccaattgggaattaaagaaataattaatttgaacagttatgaaattaatatttgctgtctgtgtgtataagtacatcctttggggttttttttttctcttttttttaaccaaagttgctgtctagtgcattcaaaggtcactttttgttcttcacagatctttttaatgttctttcccatgttgtattgcatttttgggggaagcaaattgactttaaagaaaaaagttgtggcaaaagatgctaagatgcgaaaatttcaccacactgagtcaaaaaggtgaaaaattatccatttcctatgcgttttactcctcagagaatgaaaaaaactgcatcccatcacccaaagttctgtgcaatagaaatttctacagatacaggtataggggctcaaggaggtatgtcggtcagtagtcaaaactatgaaatgatactggtttctccacaggaatatggttccattaggctgggagcaaaaacaatgttttttaagattgagaatacatacctgacaacgatccggaaactgctcctcaccactcccgtcatgcctgctgtcggcgtttgaccttccacgtgacagttcttcacaattcctttcatcattttttaaatattttttttactgcctatgggctgtgatgtatatagaagttgtacattaaacataccctcatttttttcttttcttttttttttttttttttagtacaaagttttagtttctttttcatgatgtggtaactacgaagtgatggtagatttaaataattttttatttttattttatatattttttcattagggccatatctccaaaaaaagaaagaaaaaatacaaaaaacaaaaacaaaaaaaaaagagggtaatgtacaagtttctgtatgtataaagtcatgctcgatttcaggagagcagctgatcacaatttgcttcatgaatcaaggtgtggaaatggttatatatggattgatttagaaaatggttaccagtacagtcaaaaaagagaaaatgaaaaaaatacaactaaaaggaagaaacacaacttcaaagatttttcagtgatgagaatccacatttgtatttcaagataatgtagtttaaaaaaaaaaaaaagaaaaaaacttgatgtaaattcctccttttcctctggcttaatgaatatcatttattcagtataaaatctttatatgttccacatgttaagaataaatgtacattaaatcttgttaagcactgtgatgggtgttcttgaatactgttctagtttccttaaagtggtttcctagtaatcaagttatttacaagaaataggggaatgcagcagtgtattcacattataaaaccctacatttggaagagacctttaggggttacctactttagagtggggagcaacagtttgattttctcaaattacttagctaattagtctttctttgaagcaattaactctaacgacattgaggtatgatcattttcagtatttatgggaggtggctgctgacccacttgaggtgagatctcagaagcttaactggcctgaaaatgtaacattctgccttttactaactccatcttagtttaatcaaagttcaatctattccttgtttcttctgtgtgcctcagagttattttgcatttagtttactccaccgtgtataatatttatactgtgcaatgttaaaaaagaatctgttatattgtatgtggtgtacatagtgcaaagtgatgatttctatttcagggcatattatggttctcatattccttcctacctggtgcacagtagctttttaatactagtcacttctaatttaaactttctcttcctgggtcattgactgttactgtgtaataatcgatttctttgaaactgctgcataattatgctgttagtggacctctacctcttctcttccctctcccaatcacagtatactcagaatccccagcccctcgcatacattgtgtcggttcacattactcacagtaatatatggaagagttagacaagaacatgcagttacagtcattgtgagacgtgactctccagtgtcacgaggaaaaaaatcatcttttctgcaaacagtctctcatctgtcaactcccacattactgagtcaaacagtcttcttacataacaatgcaaccaaatatatgttgaattaaagacccatttataattctgctttaaatacatctgcttgctaagaacagatttcagtgctccaagcttcaaatatggagatttgtaagagggaattcaatattattctaatttctctcttacagagtacaaataaaaggtgtatacaaactccgaacatatccagtattccaattcctttgtcaatcagaagagtaaaataattaacaaaagactgttgttatggtttgcattgtaaccgatacgcagagtctgaccgttgggcaacaagtttttctatcctgatgcgcaacacagtctctagagactaatccaggaagactttagcctcctttccatattctcacccccgaatcaagatttacagaagcccacgaagaatttacagcctgcttgagatcatcttgcctataaactgagttattgctttgtcctaaaaat

SEQ ID NO: 882 - protein, 1779 aa, Homo sapiens
MSPGTPGPTMGRSQGSPMDPMVMKRPQLYGMGSNPHSQPQQSSPYPGGSYGPPGPQRYPIGIQGRTPGAMAGMQYPQQQMPPQYGQQGVSGYCQQGQQPYYSQQPQPPHLPPQAQYLPSQSQQRYQPQQDMSQEGYGTRSQPPLAPGKPNHEDLNLIQQERPSSLPDLSGSIDDLPTGTEATLSSAVSASGSTSSQGDQSNPAQSPFSPHDHLSSIPGGPSPSPVGSPVGSNQSRSGPISPASIPGSQMPPQPPGSQSESSSHPALSQSPMPQERGFMAGTQRNPQMAQYGPQQTGPSMSPHPSPGGQMHAGISSFQQSNSSGTYGPQMSQYGPQGNYSRPPAYSGVPSASYSGPGPGMGISANNQMHGQGPSQPCGAVPLGRMPSAGMQNRPFPGNMSSMTPSSPGMSQQGGPGMGPPMPTVNRKAQEAAAAVMQAAANSAQSRQGSFPGMNQSGLMASSSPYSQPMNNSSSLMNTQAPPYSMAPAMVNSSAASVGLADMMSPGESKLPLPLKADGKEEGTPQPESKSKDSYSSQGISQPPTPGNLPVPSPMSPSSASISSFHGDESDSISSPGWPKTPSSPKSSSSTTTGEKITKVYELGNEPERKLWVDRYLTFMEERGSPVSSLPAVGKKPLDLFRLYVCVKEIGGLAQVNKNKKWRELATNLNVGTSSSAASSLKKQYIQYLFAFECKIERGEEPPPEVFSTGDTKKQPKLQPPSPANSGSLQGPQTPQSTGSNSMAEVPGDLKPPTPASTPHGQMTPMQGGRSSTISVHDPFSDVSDSSFPKRNSMTPNAPYQQGMSMPDVMGRMPYEPNKDPFGGMRKVPGSSEPFMTQGQMPNSSMQDMYNQSPSGAMSNLGMGQRQQFPYGASYDRRHEPYGQQYPGQGPPSGQPPYGGHQPGPQQPNYKRHMDGMYGPPAKRHEGDMYNMQYSSQQQEMYNQYGGSYSGPDRRPIQGQYPYPYSRERMQGPGQIQTHGIPPQMMGGPLQSSSSEGPQQNMWAARNDMPYPYQNRQGPGGPTQAPPYPGMNRTDDMMVPDQRINHESQWPSHVSQRQPYMSSSASMQPIWPQPSYQTPPSLPNHRAPSPASFQRSLENRMSPSKSPFLPSMKMQKVMPTVPTSQVTGPPPQPPPIRREITFPPGSVEASQPVLKQRRKITSKDIVTPEAWRVMMSLKSGLLAESTWALDTINILLYDDSTVATFNLSQLSGFLELLVEYFRKCLIDIFGILMEYEVGDPSQKALDHNAARKDDSQSLADDSGKEEEDAECIDDDEEDEEDEEEDSEKTESDEKSSIALTAPDAAADPKEKPKQASKFDKLPIKIVKKNNLFVVDRSDKLGRVQEFNSGLLHWQLGGGDTTEHIQTHFESKMEIPPRRRPPPPLSSAGRKKEQEGKGDSEEQQEKSIIATIDDVLSARPGALPEDANPGPQTESSKFPFGIQQAKSHRNIKLLEDEPRSRDETPLCTIAHWQDSLAKRCICVSNIVRSLSFVPGNDAEMSKHPGLVLILGKLILLHHEHPERKRAPQTYEKEEDEDKGVACSKDEWWWDCLEVLRDNTLVTLANISGQLDLSAYTESICLPILDGLLHWMVCPSAEAQDPFPTVGPNSVLSPQRLVLETLCKLSIQDNNVDLILATPPFSRQEKFYATLVRYVGDRKNPVCREMSMALLSNLAQGDAARAIAVQKGSIGNLISFLEDGVTMAQYQQSQHNLMHMQPPPLEPPSVDMMCRAAKALLAMARVDENRSEFLLHEGRLLDISISAVLNSLVASVICDVLFQIGQL

SEQ ID NO: 883 - DNA, 7987 bp, Homo sapiens
gcggccgcgcaacaaaggagtcacccggcgatgagccccggcacccccggaccgaccatgggcagatcccagggcagcccaatggatccaatggtgatgaagagacctcagttgtatggcatgggcagtaaccctcattctcagcctcagcagagcagtccgtacccaggaggttcctatggccctccaggcccacagcggtatccaattggcatccagggtcggactcccggggccatggccggaatgcagtaccctcagcagcagatgccacctcagtatggacagcaaggtgtgagtggttactgccagcagggccaacagccatattacagccagcagccgcagcccccgcacctcccaccccaggcgcagtatctgccgtcccagtcccagcagaggtaccagccgcagcaggacatgtctcaggaaggctatggaactagatctcaacctcctctggcccccggaaaacctaaccatgaagacttgaacttaatacagcaagaaagaccatcaagtttaccagatctgtctggctccattgatgacctccccacgggaacggaagcaactttgagctcagcagtcagtgcatccgggtccacgagcagccaaggggatcagagcaacccggcgcagtcgcctttctccccacatgcgtcccctcatctctccagcatcccggggggcccatctccctctcctgttggctctcctgtaggaagcaaccagtctcgatctggcccaatctctcctgcaagtatcccaggtagtcagatgcctccgcagccacccgggagccagtcagaatccagttcccatcccgccttgagccagtcaccaatgccacaggaaagaggttttatggcaggcacacaaagaaaccctcagatggctcagtatggacctcaacagacaggaccatccatgtcgcctcatccttctcctgggggccagatgcatgctggaatcagtagctttcagcagagtaactcaagtgggacttacggtccacagatgagccagtatggaccacaaggtaactactccagacccccagcgtatagtggggtgcccagtgcaagctacagcggcccagggcccggtatgggtatcagtgccaacaaccagatgcatggacaagggccaagccagccatgtggtgctgtgcccctgggacgaatgccatcagctgggatgcagaacagaccatttcctggaaatatgagcagcatgacccccagttctcctggcatgtctcagcagggagggccaggaatggggccgccaatgccaactgtgaaccgtaaggcacaggaggcagccgcagcagtgatgcaggctgctgcgaactcagcacaaagcaggcaaggcagtttccccggcatgaaccagagtggacttatggcttccagctctccctacagccagcccatgaacaacagctctagcctgatgaacacgcaggcgccgccctacagcatggcgcccgccatggtgaacagctcggcagcatctgtgggtcttgcagatatgatgtctcctggtgaatccaaactgcccctgcctctcaaagcagacggcaaagaagaaggcactccacagcccgagagcaagtcaaagaagtccagctcctccaccactactggggagaagatcacgaaggtgtacgagctggggaatgagccagagagaaagctctgggtcgaccgatacctcaccttcatggaagagagaggctctcctgtctcaagtctgcctgccgtgggcaagaagcccctggacctgttccgactctacgtctgcgtcaaagagatcgggggtttggcccaggttaataaaaacaagaagtggcgtgagctggcaaccaacctaaacgttggcacctcaagcagtgcagcgagctccctgaaaaagcagtatattcagtacctgtttgcctttgagtgcaagatcgaacgtggggaggagcccccgccggaagtcttcagcaccggggacaccaaaaagcagcccaagctccagccgccatctcctgctaactcgggatccttgcaaggcccacagaccccccagtcaactggcagcaattccatggcagaggttccaggtgacctgaagccacctaccccagcctccacccctcacggccagatgactccaatgcaaggtggaagaagcagtacaatcagtgtgcacgacccattctcagatgtgagtgattcatccttcccgaaacggaactccatgactccaaacgccccctaccagcagggcatgagcatgcccgatgtgatgggcaggatgccctatgagcccaacaaggacccctttgggggaatgagaaaagtgcctggaagcagcgagccctttatgacgcaaggacagatgcccaacagcagcatgcaggacatgtacaaccaaagtccctccggagcaatgtctaacctgggcatggggcagcgccagcagtttccctatggagccagttacgaccgaaggcatgaaccttatgggcagcagtatccaggccaaggccctccctcgggacagccgccgtatggagggcaccagcccggcctgtacccacagcagccgaattacaaacgccatatggacggcatgtacgggcccccagccaagcgccacgagggcgacatgtacaacatgcagtacagcagccagcagcaggagatgtacaaccagtatggaggctcctactcgggcccggaccgcaggcccatccagggccagtacccgtatccctacagcagggagaggatgcagggcccggggcagatccagacacacggaatcccgcctcagatgatgggcggcccgctgcagtcgtcctccagtgaggggcctcagcagaatatgtgggcagcacgcaatgatatgccttatccctaccagaacaggcagggccctggcggccctacacaggcgcccccttacccaggcatgaaccgcacagacgatatgatggtacccgatcagaggataaatcatgagagccagtggccttctcacgtcagccagcgtcagccttatatgtcgtcctcagcctccatgcagcccatcacacgcccaccacagccgtcctaccagacgccaccgtcactgccaaatcacatctccagggcgcccagcccagcgtccttccagcgctccctggagaaccgcatgtctccaagcaagtctccttttctgccgtctatgaagatgcagaaggtcatgcccacggtccccacatcccaggtcaccgggccaccaccccaaccacccccaatcagaagggagatcacctttcctcctggctcagtagaagcatcacaaccagtcttgaaacaaaggcgaaagattacctccaaagatatcgttactcctgaggcgtggcgtgtgatgatgtcccttaaatcaggtcttttggctgagagtacgtgggctttggacactattaatattcttctgtatgatgacagcactgttgctactttcaatctctcccagttgtctggatttctcgaacttttagtcgagtactttagaaaatgcctgattgacatttttggaattcttatggaatatgaagtgggagaccccagccaaaaagcacttgatcacaacgcagcaaggaaggatgacagccagtccttggcagacgattctgggaaagaggaggaagatgctgaatgtattgatgacgacgaggaagacgaggaggatgaggaggaagacagcgagaagacagaaagcgatgaaaagagcagcatcgctctgactgccccggacgccgctgcagacccaaaggagaagcccaagcaagccagtaagttcgacaagctgccaataaagatagtcaaaaagaacaacctgtttgttgttgaccgatctgacaagttggggcgtgtgcaggagttcaatagtggccttctgcactggcagctcggcgggggtgacaccaccgagcacattcagactcactttgagagcaagatggaaattcctcctcgcaggcgcccacctccccccttaagctccgcaggtagaaagaaagagcaagaaggcaaaggcgactctgaagagcagcaagagaaaagcatcatagcaaccatcgatgacgtcctctctgctcggccaggggcattgcctgaagacgcaaaccctgggccccagaccgaaagcagtaagtttccctttggtatccagcaagccaaaagtcaccggaacatcaagctgctggaggacgagcccaggagccgagacgagactcctctgtgtaccatcgcgcactggcaggactcgctggctaagcgatgcatctgtgtgtccaatattgtccgtagcttgtcattcgtgcctggcaatgatgccgaaatgtccaaacatccaggcctggtgctgatcctggggaagctgattcttcttcaccacgagcatccagagagaaagcgagcaccgcagacctatgagaaagaggaggatgaggacaagggggtggcctgcagcaaagatgagtggtggtgggactgcctcgaggtcttgagggataacacgttggtcacgttggccaacatttccgggcagctagacttgtctgcttacacggaaagcatctgcttgccaattttggatggcttgctgcactggatggtgtgcccgtctgcagaggcacaagatccctttccaactgtgggacccaactcggtcctgtcgcctcagagacttgtgctggagaccctctgtaaactcagtatccaggacaataatgtggacctgatcttggccactcctccatttagtcgtcaggagaaattctatgctacattagttaggtacgttggggatcgcaaaaacccagtctgtcgagaaatgtccatggcgcttttatcgaaccttgcccaaggggacgcactagcagcaagggccatagctgtgcagaaaggaagcattggaaacttgataagcttcctagaggatggggtcacgatggcccagtaccagcagagccagcacaacctcatgcacatgcagcccccgcccctggaaccacctagcgtagacatgatgtgcagggcggccaaggctttgctagccatggccagagtggacgaaaaccgctcggaattccttttgcacgagggccggttgctggatatctcgatatcagctgtcctgaactctctggttgcatctgtcatctgtgatgtactgtttcagattgggcagttatgacataagtgagaaggcaagcatgtgtgagtgaagattagagggtcacatataactggctgttttctgttcttgtttatccagcgtaggaagaaggaaaagaaaatctttgctcctctgccccattcactatttaccaattgggaattaaagaaataattaatttgaacagttatgaaattaatatttgctgtctgtgtgtataagtacatcctttggggttttttttttctcttttttttaaccaaagttgctgtctagtgcattcaaaggtcactttttgttcttcacagatctttttaatgttctttcccatgttgtattgcatttttgggggaagcaaattgactttaaagaaaaaagttgtggcaaaagatgctaagatgcgaaaatttcaccacactgagtcaaaaaggtgaaaaattatccatttcctatgcgttttactcctcagagaatgaaaaaaactgcatcccatcacccaaagttctgtgcaatagaaatttctacagatacaggtataggggctcaaggaggtatgtcggtcagtagtcaaaactatgaaatgatactggtttctccacaggaatatggttccattaggctgggagcaaaaacaatgttttttaagattgagaatacatacctgacaacgatccggaaactgctcctcaccactcccgtcatgcctgctgtcggcgtttgaccttccacgtgacagttcttcacaattcctttcatcattttttaaatattttttttactgcctatgggctgtgatgtatatagaagttgtacattaaacataccctcatttttttcttttcttttttttttttttttttagtacaaagttttagtttctttttcatgatgtggtaactacgaagtgatggtagatttaaataattttttatttttattttatatattttttcattagggccatatctccaaaaaaagaaagaaaaaatacaaaaaacaaaaacaaaaaaaaaagagggtaatgtacaagtttctgtatgtataaagtcatgctcgatttcaggagagcagctgatcacaatttgcttcatgaatcaaggtgtggaaatggttatatatggattgatttagaaaatggttaccagtacagtcaaaaaagagaaaatgaaaaaaatacaactaaaaggaagaaacacaacttcaaagatttttcagtgatgagaatccacatttgtatttcaagataatgtagtttaaaaaaaaaaaaaagaaaaaaacttgatgtaaattcctccttttcctctggcttaatgaatatcatttattcagtataaaatctttatatgttccacatgttaagaataaatgtacattaaatcttgttaagcactgtgatgggtgttcttgaatactgttctagtttccttaaagtggtttcctagtaatcaagttatttacaagaaataggggaatgcagcagtgtattcacattataaaaccctacatttggaagagacctttaggggttacctactttagagtggggagcaacagtttgattttctcaaattacttagctaattagtctttctttgaagcaattaactctaacgacattgaggtatgatcattttcagtatttatgggaggtggctgctgacccacttgaggtgagatctcagaagcttaactggcctgaaaatgtaacattctgccttttactaactccatcttagtttaatcaaagttcaatctattccttgtttcttctgtgtgcctcagagttattttgcatttagtttactccaccgtgtataatatttatactgtgcaatgttaaaaaagaatctgttatattgtatgtggtgtacatagtgcaaagtgatgatttctatttcagggcatattatggttctcatattccttcctacctggtgcacagtagctttttaatactagtcacttctaatttaaactttctcttcctgggtcattgactgttactgtgtaataatcgatttctttgaaactgctgcataattatgctgttagtggacctctacctcttctcttccctctcccaatcacagtatactcagaatccccagcccctcgcatacattgtgtcggttcacattactcacagtaatatatggaagagttagacaagaacatgcagttacagtcattgtgagacgtgactctccagtgtcacgaggaaaaaaatcatcttttctgcaaacagtctctcatctgtcaactcccacattactgagtcaaacagtcttcttacataacaatgcaaccaaatatatgttgaattaaagacccatttataattctgctttaaatacatctgcttgctaagaacagatttcagtgctccaagcttcaaatatggagatttgtaagagggaattcaatattattctaatttctctcttacagagtacaaataaaaggtgtatacaaactccgaacatatccagtattccaattcctttgtcaatcagaagagtaaaataattaacaaaagactgttgttatggtttgcattgtaaccgatacgcagagtctgaccgttgggcaacaagtttttctatcctgatgcgcaacacagtctctagagactaatccaggaagactttagcctcctttccatattctcacccccgaatcaagatttacagaagcccacgaagaatttacagcctgcttgagatcatcttgcctataaactgagttattgctttgtcctaaaaat

SEQ ID NO: 884 - protein, 1726 aa, Homo sapiens
MSPGTPGPTMGRSQGSPMDPMVMKRPQLYGMGSNPHSQPQQSSPYPGGSYGPPGPQRYPIGIQGRTPGAMAGMQYPQQQMPPQYGQQGVSGYCQQGQQPYYSQQPQPPHLPPQAQYLPSQSQQRYQPQQDMSQEGYGTRSQPPLAPGKPNHEDLNLIQQERPSSLPDLSGSIDDLPTGTEATLSSAVSASGSTSSQGDQSNPAQSPFSPHDHLSSIPGGPSPSPVGSPVGSNQSRSGPISPASIPGSQMPPQPPGSQSESSSHPALSQSPMPQERGFMAGTQRNPQMAQYGPQQTGPSMSPHPSPGGQMHAGISSFQQSNSSGTYGPQMSQYGPQGNYSRPPAYSGVPSASYSGPGPGMGISANNQMHGQGPSQPCGAVPLGRMPSAGMQNRPFPGNMSSMTPSSPGMSQQGGPGMGPPMPTVNRKAQEAAAAVMQAAANSAQSRQGSFPGMNQSGLMASSSPYSQPMNNSSSLMNTQAPPYSMAPAMVNSSAASVGLADMMSPGESKLPLPLKADGKEEGTPQPESKSKKSSSSTTTGEKITKVYELGNEPERKLWVDRYLTFMEERGSPVSSLPAVGKKPLDLFRLYVCVKEIGGLAQVNKNKKWRELATNLNVGTSSSAASSLKKQYIQYLFAFECKIERGEEPPPEVFSTGDTKKQPKLQPPSPANSGSLQGPQTPQSTGSNSMAEVPGDLKPPTPASTPHGQMTPMQGGRSSTISVHDPFSDVSDSSFPKRNSMTPNAPYQQGMSMPDVMGRMPYEPNKDPFGGMRKVPGSSEPFMTQGQMPNSSMQDMYNQSPSGAMSNLGMGQRQQFPYGASYDRRHEPYGQQYPGQGPPSGQPPYGGHQPGPQQPNYKRHMDGMYGPPAKRHEGDMYNMQYSSQQQEMYNQYGGSYSGPDRRPIQGQYPYPYSRERMQGPGQIQTHGIPPQMMGGPLQSSSSEGPQQNMWAARNDMPYPYQNRQGPGGPTQAPPYPGMNRTDDMMVPDQRINHESQWPSHVSQRQPYMSSSASMQPIWPQPSYQTPPSLPNHRAPSPASFQRSLENRMSPSKSPFLPSMKMQKVMPTVPTSQVTGPPPQPPPIRREITFPPGSVEASQPVLKQRRKITSKDIVTPEAWRVMMSLKSGLLAESTWALDTINILLYDDSTVATFNLSQLSGFLELLVEYFRKCLIDIFGILMEYEVGDPSQKALDHNAARKDDSQSLADDSGKEEEDAECIDDDEEDEEDEEEDSEKTESDEKSSIALTAPDAAADPKEKPKQASKFDKLPIKIVKKNNLFVVDRSDKLGRVQEFNSGLLHWQLGGGDTTEHIQTHFESKMEIPPRRRPPPPLSSAGRKKEQEGKGDSEEQQEKSIIATIDDVLSARPGALPEDANPGPQTESSKFPFGIQQAKSHRNIKLLEDEPRSRDETPLCTIAHWQDSLAKRCICVSNIVRSLSFVPGNDAEMSKHPGLVLILGKLILLHHEHPERKRAPQTYEKEEDEDKGVACSKDEWWWDCLEVLRDNTLVTLANISGQLDLSAYTESICLPILDGLLHWMVCPSAEAQDPFPTVGPNSVLSPQRLVLETLCKLSIQDNNVDLILATPPFSRQEKFYATLVRYVGDRKNPVCREMSMALLSNLAQGDAARAIAVQKGSIGNLISFLEDGVTMAQYQQSQHNLMHMQPPPLEPPSVDMMCRAAKALLAMARVDENRSEFLLHEGRLLDISISAVLNSLVASVICDVLFQIGQL

SEQ ID NO: 885 - DNA, 79749 bp, Mus musculus
  misc_feature (1)...(79749): n = A, C, G or T/U
agagacagaaagagcaacaggagggtattaagagagagggagtagtggcctccagaaaagatatgttcaactccaaattcctggtatctgcaagtgagaagaaagtgaaaatatgggaaagtgtttgtagatgttaataaattcaggtgacatcatttctcattgtctggatgggcccaaaagccaataataagcatcccgataagaaaaagaacaatacagaaaaaacagatataagactctgtaaatacaggcagagagaagagttatgtgaacaagccaaggtgtgtcaagtattcctggcaaccaccagcagccaagagagggtatagactaaataagtctcactcagagtttatcagtcagctttctgtcactagaataaaatgcctgaggtgacttacttatagggagaaaaggtctgggctccaagttcaagaagatccagactgctgggcctgtggtgaggcagcattgaatcctagtagaagcacatggtaggtgatgcccaacacacaccatattgccaggaagaagaggagggaggcagggctccaccagcccctttgagaactgtaccacacacagtgacataaacgtctcctattatgtcttctctctgaagggtcctacctaccacctcacgctgtggccatcttgggaagcaagccttcaacacctgggcttttggggacatcccaggtctgaactcagcagcattgctttgccaacacctgcggtcacttgttacaccctggtattagttactcctggcactgtgacctccattcttgatgaacaatggaacagaggaaggcctatccaattcacagggccagaggcaggtgttccaagatcagagagtgaggtcatttctgatacagtgaatgaaatccattagaacaaaaagatttgcatacacataccaggaaactcacaggatccctggataaaatagagacttgcagtgagttaactaacaaattaatctgttgtgcacactgagaacagaaagcagatgttggggcttcccatgtgaaggcttggttcccaggtagcagtgatcataggtggggatttttggagtctggtggcctcctaagggctctgaagtcatggatgaatcaatcagcaatgcatttgcagcttgatggaccattgggaggtggaagacattttagaaagtcgatcacagagagtgctcccttgaaggtgggctatgtatctctgctattctgccccctttctggttgccatggtgagtatctctggtccaacatatcctccttgccatggcttgcctctccaaagccctgagggatggaactaagtgatctgcaacactgatataccttttgtctttacattgcctgcctcaagtgttttatcacagcaatggaaatgttgttgacaagaaacctcggggctggagagatggctcagaggttaggagcactaaatgctcttccagaggtcctgaattcaattcccagcaaccacatggtggctcaccaccatctgtaatgggatccaatgtcctcttttggtgtgtctaaagacagctacagtgtgcatatacattaaataaataaataaataaaactttaagaaagaaagaaagaaaggaagaaagaaaggaagaaagaaagaaagaaagaaagaaagaaagaaagaaagaaagaaatgttgctacctgcaagagaacaagcaccaggctgcttgttttctgccacaatgactgccctttctgtgaggcatgggggaaacatgggcacattctgggctatcccatcagctgtggcttcaaaatgcaccagcactacaaccaatctaaaactcgaagtataaattattgcaaacaacctttccagagggactaccatgtcaaaaatattcttaaatggtatttaacataatgtaaaaataagaatttagccaggcaaggtggcatagcctggagtccctctccggaggctgagacaggaggatggttggagcccaagaaggttgagtgacacaggggtaccctgtcaccaaaacaaaacacagaaggtgaaataaaacaagcaagagttttcccatctagatttaaaggcttaaaacaccttgaaataaatcagaactggaggccctgacctcacctgaattgagttttcttcaaaccaggcagctacccatgcaagactcctacaacccaagagcatccagtgaccaaagctaaaagagcatttaaaacaaatcgctgaagatggaagaaggaagttgggaggggagggggagagggagagagagagtaggggggaatgtgggaggggggacagagacagagacagagacacagagacactgggagacaaagattcctcctggaagaaacagccaaattttgctctgacgctaaaattgtaagagctctaaggcagggtggagagccacatcaaaaccatccaagcttaacagttgcactctgagctcccagcaactaactgcagctcttgcactgggctcccaccagtgatggtggatgggagagctcacagggtactatctttgattcctgaatgattggctactggtggatcctggagaaagggagtcactgttttgggttgtgaatccagctgctgagcccactgtactggctagttttgtgtcaacttgacacagctggagttaccacagagaaaggagcttcagttgaggaaatgcctccatgagatccagctgtaaggcattttctcaattagtgatcaagggggaaaggccccttgtgggtggtgccatctctgggctggtagtcttggttctataagagagcaggctgagcaagccaggagaagcaagccagtaaagaacatccctccatggcctctgcatctgcccctgcttcctgacctgcttgagttccaatcctgacttcctttggtgatgaacagcagcatggaagtgtaagccaaataaaccctttcctccccaacttgcttcttggtcatgatgtttgtgcaggaatagaaaccctgactaagacacccaccaaggtccaaatggtcacacaaatggccctggttaaactctgcagctcatcaaacaatagacatgaatgtgagagtttgtggggagttgggggagggtgggcaggaagtagttattatcatgtatatgtaaaaagctgctaaagaaaaatgtaattgatttaaaaatgctacataaataggttacattttggtgatacacctgcaaaggctcttagactgtgtaaaacaaaaacaaaaatgaaaagtcagctataaactgggttttataccaattcacatacctttcatcccagtgttccagaaacagaggcaggaggatctctataagttcgaatccagcctgatctacatagtgagttccaggccaggcagggctatgtagttaagacccagtacaaaagatcttgaaaccaagatccttttattatatacttatttacttctctctctctctctctccctctctctctctctctctctctctctctgtgtgtgtgtgtctgtgtgtgtacatatacaaatgtgcaggttcgagcacagtttacaggagttgattcttgacttccatcacataggctctgggatcaaaccctggtcctcaggcttggctggaggcgattttattctctgacagcccctatcttcgacatatttaaataatagctaccccccagtttatatagaattggaatgtaattaataaggttgatttaataattgaactttgtaccctatgaataaaagactcatttctttgccagagcccatcaaacatttatgaaaattgatcatatattaagccataaagaaaaaaaaatccaatagaatcccaaaagccgatcgaggaaaagcctcatctttgaccaaagtgcagttagggttaaagattattaagaaaggtttaaattaacaagccaaccatttgaaaattaacaaccaccttcgtaaataacaaagtaaaacctgtgctgtgacaaactcgggtgacaagcccgagtgacaaaccacttagagaagttacacttcaaagcatcacgtgaggactggaccgaaaggcagctgccatgcacggaggaggggacccgcacgtgaagaccagaaatgtgtgtctgagaaacaggacaagaatcagcaagtgaagatccaactgaagttagcggcggggttgggggagtagcaacagagccaggaagagaaaagtggaagtcaataaagataaaatgcagatctaataaataaggaaggaggcaaaaaataatggttttctgaaagtctaataaattaggtagatttccagcagagagagaaatcaggatcaactgtagaacaaaaatataagttgagttttaggggaatacaactggacaggacatgttagcgggaaatacaggcatgacccaaaggtcagaggaagaaacaggaaatcttatcaccacaaataaaaccacaggagaaggacacattcgctgaaaaatactggctctgatccttcttctagcaagttcttcctgtttgattcagggcatcaagggttaaatgctgctttgttggtgttaaaaaagtatagtgctgggcagtggtggcacatgactttaattccagcacttgggaggcagaggcaggtgaatttctgagtttgaggctagcctggtctacagagtgagttccaggacatccagggctacacagagaaaccctgtctcgaaaaaccaaaaaaaaaaataaataaataaataaaagagtatagtgttcaactgagggtgggggtggcgtgggccccaggtaggggttaggggatggtgcactcttttaatcctagcatttaggaggcagaagtaggcagatctctgagtgtgaggctagcctgatctacagagtgagctccaggacaatcaggacttttcagataaccctgtctcaaaaatgaaacaaacatacaaataggtagataaatactgtagtgttaaagccaagtgtggtagctgccccagctctgtttgctctgtttgctctgtttgactgtcaacttaacatgacctagggtcaacctgagaaggaggctcttgattaagggattacttagatcagattgtcctgtgagcaggtgtaggggaacctgtattgatggtaaattgatttgggagggccagcccactgtgggcgtcatcaatccttaggcaggtgtccctaggacacaccagaaagctagctcagcttgaatctgagtgaaccagcaagcaatggtttcaaagtttctgctttggagggtcttcttagaattagagaaagaatgacacacagccaggctcctgaggtagctagcagaagccaccaggacacttataactcaccttctagtgtcctctgtctctcaacacaccttgaggtctaagactttcaagttcaactttgagtgtctttgacatccctagtctatgattaacgtgaggtgatgctgtcatagtgcctcagtaatgacagctatgactcttgtgactttgccagctgctaccacacttttcagatgggtgaggcagggctgtattgttacctatctccattcaaacaaggctcaaagtagtagatgcggttagcattttatggctggtgtgaggctgtggcagttggtgttgactgccagtctgacagaatctagactctcctagagatgggtccctgagcatgcctgtggaagattaccgtgagtatactaattgacgtgtgaagatgcatcttaattgtgggtgagaccattcgctggtcaggggatcctggactgcataaatagagcttcctgtcttcttccagaccgctctgcctctgtgacttaggccacggtgagggactgcaacctgaactgagctaagacaggctctttcccctcccccgccccccattatgttgctttggtcagagagtatatcacaacaacacacaaagaaactaaggcaggaatctccaggtctatttcccctgcctcagaaagcagaagagcacgtgtaacaacccggtgttctaatttagtttctgttactgtgatagaacgtcaaaaccagaagcaacctgcgcaggacagggtttgtttggcttacaggttacagcgcatcgagggggaaagtaaggaccggaactcaaattggagcccacagaacagcccactgagctcaaagcgctccatggcttttccagtccagagctttcgtaagcctccctgcaaacagcatggtctggtgcgtcacagcaacacgctgctctctggcagccatctctgcattagctacttcctgtgtaaaaccccaagacaaaagccacttacagaacaaagagtttactttggtccaaggttccagagagttcatcgtggtcggaaggcagagcggtcggtgggcagcaagcatacagcggagcagagtgggcagctgagaacacacagcagcgggcaaacagaaagtggggcgagacctcaacactcccaccccctcctcagagatgtgctttttcaaagaaggtgacaccttcttaaacctcacaaatgnnnnnnnnnnnnnnnnnnnnaaatgttcaagtatctgagcgcctggggagcgttagccacccaagccaccattccctactgtctcaattacttttctattactgtgacaaaacactatgaccaaagcaacttatttttttaaaaaagtgtttaacttgacttatagtttcagaaagttagagtccatgatggccaagaaacagccagctgagggtcacattctgacccacacccatgaagcagaggcctctagaaattgcatgggttttgttttgttttgttttgttttgttttgttttgtttttgacacctacaagcttgctccccatccctcatcccccagtgacacacccctgaataaaaccacacttccaaaaaaaaaaaaaaaaagccgggcatggtggcgcacacctctaatcccagcacttgggaggcagaggcaggcggatttctgagtttgaggccagcctggtctacaaaatgagttccaggacagccagggctatacagagaaaccctgtctcaaaacaaaagcaaaaacaaaaaccaccacacttcctaatccttccaaatagttctgccaacagagagagagtatccaaatgtcccagtctatggtgggggcactctttttcagaccaccacacctgtgtatcccggctaagccagtgacagaagaactgtctcaagctgagagtcagtatgatgcctagcattaaaattctggaaccatccttcatgatgtccagaacatgacaaggatgctcagttagtaaaaagtctttctggttttacattgctccaagttctggaccagttatctccccatcccatcccccggcccatgaatagtgtgattgtctactggagaacagaagagatacaaaggaaaacatgtagagctctgaagacagacatacaaccaacatgcaagaatttccttttgggttggggtgttggtgccgcatgtctttagtcccagctctcaaaaggcagaggcaagtgactgagagctggacaccagnnnnnnnnnnnnnnnnnnnnnnnnnnnnnnnnnnnnnnnnnnnnnnnnnnnnnnnnnnnnnnnnnnnnnnnnnnnnnnnnnnnnnnnnnnnnnnnnnnnnnnnnnnnnnnnnnnnnnnnnnnnnnnnnnnnnnnnnnnnnnnnnnnnnnnnnnnnnnnnnnnnnnnnnnnnnnnnnnnnnnnnnnnnnnnnnnnnnnnnnnnnnnnnnnnnnnnnnnnnnnnnnnnnnnnnnnnnnnnnnnnnnnnnnnnnnnnnnnnnnnnnnnnnnnnnnnnnnnnnnnnnnnnnnnnnnnnnnnnnnnnnnnnnnnnnnnnnnnnnnnnnnnnnnnnnnnnnnnnnnnnnnnnnnnnnnnnnnnnnnnnnnnnnnnnnnnnnnnnnnnnnnnnnnnnnnnnnnnnnnnnnnnnnnnnnnnnnnnnnnnnnnnnnnnnnnnnnnnnnnnnnnnnnnnnnnnnnnnnnnnnnnnnnnnnnnnnnnnnnnnnnnnnnnnnnnnnnnnnnnnnnnnnnnnncaaactcagaaatctgcctgcctctgcctgccgggggctgggattaaaggcgtgcgccaccaccacctggcttgactgtgctttctttatccgtcccttttttctaacttattttgaaaataatataatatgtataaactatacatgcatgaatatatattatatataaaattataatatataattttcatatatattgtatatgcatttcactatatatatttgcaggtttggcagctcacaaccacctgcagctccagcctcagagaatccaacgccctcttgtggactcctagggcacctgcactcatgtgtacatacccagacacataattaacagaaaagtaaaacttttaaaatgtcatcatttgaggcagggtctcatatagtccaagacatcttcaaactcactatgtagccacaggtgaccctgaacttccgatcctccacagtactggaattacaggttatgtacccccatgctgggttcctgtggtactgagattcaagcccagggatccatgacttcttggcaagtagtctcccaactgagctatctctactaccctcgatattacttcctagttctttctgggcttgattgacttcaataataatctgagccagtactttttgtgtgctttcccgcctgtacacggtggcgagattgagctgggtcctgtctctatcactatcacgctccggagtgttttatttctactctgctccaagccagcatctgtcacttcggctgccattctccctcagatgtgagtcatgctttgctgtctttgcccgtgaccgcttacatgtcacacttgatgctggcccgcagcttctctgtcatctttcacccattctgtctgccaagatccacaagcactgatgctctttagtctatcagaattcagaatgttgcttttgcctccattccctggagtgtgtgtgtgtgtgtgtgtgcgcgcgcgcgcacgctcgtacgtacaggtcagaggttaacactggacaccttcttctgttgctctctgtcttacttcctcgagacagtgtgtctcactcatttacctagattggctagccattgacttctgagttcctggggtacacccttccttattacccagtgctaaggttacagggatacccagctgggccctgctttatatgtgagtgtggggacttgaactcagatcctcctgtttgcacggataagtgctcttacccacagaggcatctctctagcacctccaccttatttttggtgacaaggaccctcactgaacctggagctcactaattggctacattggctcccagcaagccccggggatccctcctgtcaggtctgcgtgagcatgtctggtgtttttatgtgggttctggggatctgaacttgcatgcatcggaacagcatgcaccgtactgctacagcaagcactttgctgactgagccgtctctcccagccttgctcccgctctcgaaaggcaatttagctgaaagagggttcagactgatgaatgcttgctttaattgccttgactatgctataacaacaatgttctccagcctttcctgtggctgatgggtttgtggtctcactgggctgtgtctcggatgactaaagaaagcgttcttcctcctgagacgttgagccacaccttggtcctgtccctggccatgtgtgaccttggacttagttgctcactgttctcagttttgtaagcctagcttcaagggcatttgctgctgctgctgctgctgctgctgctgctgctgctgctgctgcctgggctggttgccatggttaccctcacctgggttggctagagctgcagtaaggaaggaccacaggctggctggcttacaaaatagaaacgcgttttctcagttccagaggacacaattctaagaggagatgttggcagagctggcgtcttctaagccctctgtccttggcagatcgatatcttcttccagcattcccctggtacccatctctcttcttccctttctatgtgagtgtgtgtgtgtatgtgtgtgtgtgtgtgtgtgtgtgtgttgtgttgtttgagatagaacctaggattttgtgcatgctaggtaggctgtttaccagtgagctgtacccacagctctgggaggaggatgccatcatctccctattgtaactggaggcagacattatgatgtctttccctgcatctcaccatgtgaccttggctacccagtgggctctccctccctccctggtgggcaaccccacctgaccctccttagcctgtacccagctcctagacacaagactaactgacctaacacagctccggctggagctacatgacgtctgaaggttgggcctgaaaggttcacagcatctctgctgcatgggattggtcgagccagcatcttgcaagagcatccccctaaagggagagagtcaggaagtgtgaacactaatgactgtggtcaggcaaagcaggactgtccaggggccacgcccatgcaacactttgtggaaatgttgatttaaactcagggctgggggagatggcaggctgggaaagtgctagctttgcactttttactacacttctgtaaaaagcctgacatgaggaatcacttgtaatcccggtgctggggaggcaggtgacaggcagctcctgaccagacagcctagtcagcaagtctcaggtcccagggagaccagggatcaaaacaagtatccagatgttaacatctggcctccatgtgcacctgcacacttgtgggtgcctaaacacacacacacacacacacacacacacacacacacactcacacacacacacactcacacacacacacacttagaactgcttccaatcttcaaagtcaagacaaggggctgaagagatggctgagcccatagagcgtcagcttttgaagaggactagagtttggttctcagcacccaggaggggcagctccctggaactccagccccaggggttcagccacctgcttctggcctctgtgggcaccagcatatgtgcatacacacaaggttttctaaacatgggaaatcagtgctgctttgatgatttcctactgggtggggggagcttcccttttcggttgcatatttaatagaagtatctaggtgtagactcctctggtttgtccctttgggaggagacactcctatcacaaccctaaggactggatccagggtggcaagcatgccaggcgggtgttctaccaaggagccacagtcccaggctctgtgcaattcataaatctgagaaatgtttttcaccaattctggaatgttctcagacaacatcacatcaaatatggtctctttctccttccagaccttcttccagacagatcttgggcctgacccctctctttgtttcacttttcctacttcctatgtcatcactagctctgcaagtcgtgtcctgggtgatttccttagctctgccttccaggtcaccagaagtttcttcagctgtgtctttcttgtttgtttgtttgtttttcgagacagggtttctctgtgcagccctggctgtcctggaactcactttgtagaccaggctggcctcaaactcagaaatctgcctgcctctgcctcccaagtgctgggattaaaggcatgcgccaccacaccccgcttcttcagctgtgtcttatccaccgattcaccattgactgagattttaactccagtgactatttttcttttttgaagatgtttcttcttcctagttcttggtgtcttttttcctcttctggttattttaagtgatttaaagcaaagcatggtgggtagggcttatatgtaaatacttgagaagcagaagcagcaggacccaagttcaagactatcctgtacaacatagcaaagtccagcctcaggaaatatatatttattttgtatgtatggtttgtgtgtgtgtgtgtgtgtgtgtgtgttagagagggggaggggaggcaggtgtgtctgtggaggtcaaaggacaacattggggatcaaccttggccctccaccttggaagagttgtgtctttttgttgtttgttgctgttccaatgtcccaagagtgctgggattaagtctcattctgcctcaccagggatttgaactcatatcctcacgtttgtgtagcaagtgctgtattcactgagccctcttgtcagcccttgctgacaatattttttaaaaattttagtagcctcctgctttgtgccctggcctgagctcttgggatgtgatcacctcctgcatggtagctgcatggtggttcagtcagtcactgaattggttgttcagttggcagaagggccttgcagcctgagtttctcctttctgccctgtgtcagagtttcccttgccttttctctctttccactgaaaatggttggctgtggttgttgctgttagattctgcccaaattccttagcgggactgtcagcttcagctcggtgcctgggctccgatatactccaaaggcatcatgcaaaccaggaaggaaaaaagaggttgtaaatcaaacaatatgcagacagtggttcaataactgggtgtgggggggcagacttagcctcagcagcccttgcaaggggatggattgcaggtaaaaacctacatataaaagtaaaattataaaagcaccgggtgctgatgagacaagaacaggctttttaattattcacgaaactgcaaccaacctgaagtcttgacttcaaaatgctaaaccttacgcacgctggagaactaaggagcctgtgaagtaagaggctggctaagataatatttgcaagcgctgatccaggcttggtatccccagtctgcacggtgcttagtatgagacagacttagagtcctcagtctcgaggctcagtacctcaggctgcagcatgcttaccaatgtcctcaagtggattaataccgcttagaagggtttctttggcttatacttctacattgctgttcatatttgaaggaaatcagatcagaaactgaaggcagggtctgggaggcaggagctgatgcagaggccatggaggggggctgcttactgctccctgtggcttgctcagccctctttttgttgttgttgttgtttgtttgtttgtttgtttgttgttggttttgttttgttttgttttgttttgttttgttttgttttgagacagggtttctctgtatagccctggatgtcctggaactcactttgtagaccaggctggcctcgaactcagaaatccccctgcctctgcctcccaagtgctgggattaaaggtgtgcgccaccaagcccagtcctctttcttatagaacccaggatcaccagtccagggatggcaccacccacaatggtctgggccctccgctttgatcactaattgagaaaatgccttatagcaagatctcatggaggcattttctcaactggaaaaaataaaaatctccatcagagaagaaggtccttcctctctgatgactctagcttgtgtcaaattgagacaaatccagccagttcagaaatgaatccataattcactaagcaagaaagacagacccagaagcccgtgagggtcacacccttacactaagtgcagtgaaagaccctgggcctgcactctggctcagcaaaatggctcagccagtgaaggtgcctgcctcgaagcctaacgacctgggtttgatccccgaaactcagagtgcaaagaaagaattgactcccgtacattgtcctatgacggtcacatcatcgtagctgatgggggacgctgtgggttagcatgcagtccccgagtgtgaccttacctgggaaaaaagagaatttgccagtgtgaccttaagaagttgagggggtgtgccccaggacccactccatgctacatggcgcttggccactgggctatgagctaatattttctttgtggtggtttgctatttgttcgtttctttgtatttaaaaacagggtcttacagaatccaatcaagccctggacaattttgatccccctgcctccattctcaagtgctgggattatggacatgcgtggatcttccaatctgtttttcctaattttttattttgaaacagtgtttcactactttacccatgatggtcctgtgtcagcctcctgctgaagcgtgtcaaattaaggtcttgagatagactcatctgtgactacacagctggaccctaaatttgatggcaagtgtccttttattgtttgtttggttggtttggtttggttttcattatttatttatttatttatttatttatttatttatttatttattgaggcagggcctctctgtgtagctctggctgtcctgaaacttgctatgtagaccagactggcctcaaacccactgagatcgacttgcctcttcctcccaagtgctgggattaaagtatgccaccatgtccagcatcaactgttactataagagatgcacaggcagaagacagacagacagacagacagacagacagacagacagacagacagacagaagaggcaatgtgaccactaaggctgagataaaaatggccataagtcaggaactcaggaaccaccagctgctgagagatgctgaaaatttaagggaagaccacagtccatgattttcagagggtccagagccctgaccacagcttggccttgggactctgccctcagtgatgtgaattcccattgtcctaagcgaccctgatgtgggcactcatggagtggcacatggtggcagggaaatttggcggcccaggcttggtcatgcgcattctttcctcctaggactttctcagtgtgaataactgatgatttgtaaaggatctattggcatgagtgctcgctcactttcatcttcttgaaggaaaagctgaacagacagtgtacggagaaacaaaagactattccgaagccactactccacaatgatagagaaaaataataatggtggccagggctggtgtagggtgtgatgtcctctcgccccccagggatgggccctttgtcccttcccttaggatcctggccctgtggagaggtagccatgggaagtcagtgcagggagagaaacaggagagatctcagtgcaggccaccggtacaaggtcccagagctgagagacagacagagagcccaatcccaggacgggtgccgtgccttctccatcctacaggacaattcactctgtggccaccagacaccaccatgatggtgacaggtcagacacagggatgtggtcacacagctttacgagacaaacagaaattgtgtgcattctatttttgtaaaactaaaaaaagaataaagagctttgggcgtgcagagaaaggggctgcaaggatttaccgtacgtacgtgttaacagggaggccactgcgggatgcagcttgctttcaggtttactgtctaccttctcttgggtggcttgtgtaatccaaacaaaaacatggagagacaaaaacagccagtgcctgccaggccacacccacccctgggctggaggtgcagaggggacctggcatctgcaggccatcccctccactctctccacaaggtgctcttatgtgctcattgagtttcccaccctcaaaggagtgcctgagggaaaggaaagaagccccctgacccaggcccagaacccctcatctggggctggggtttggggtgggggctcctctccctttctaatcgtttttatttttttattaattttatttattcactttacaactcaatatcagcccttcctctccacccagtttctccagccttgcctgggctgactagagaagtggaggtttgagtgacagtggcacggggtgtgtctgggtccgcctgttggtgcgatatgcccttctcggtggtcttgctagaagggtgtctatgggggctgcagttgagtgtggtgataggcaggtgctaaggctttggagggctgtgtgaaggagcatggctgccagatgctggctatggccttccacctttgcctgaagtacaaggctggacctggcctcctttaagaagcaacttatcttatgtcacagagctcaaagggaaaactgagggatcacgcgcacgcgcacgcgcgtgcgcgtgcgtgtgtgtgtgtgtgtgtgtgtgtgtgtgtgtgtgtgagagagagagagagagagacagagacagagacagagacagagagacagagagagacagagagagagagagaaagagagagacagagagagacagagacagagagaaagagacagagagagacagagagagacagagagagagagagacagagagagacagagagagacagagagagagaaagagagagagacagacagagacagggagagagacagagagagagagaggacaatccccaatgtgtcgcctgccctccggaatcctctattggctttagggtgcctgacacgcatagagtagacagccacgtggcccagggctatccacgaccctgaggacatggctctgccatactcccagtctggtgatctttgtgttgaatggctgagcctagacaccatccactttaactttgacttgggtgttaggctctctacagtgccgggaggcaggaactctggggtctgtgccagctgcccccatgccctcccgtgttgcttccttctgttgcttccttctcacatcccgtgccctggaaaagcttcctcaggatgccctctgaactttgtcaccccaattctgctgtttcctgcttgattttcattggtagatgagccccaagtgcgggggcaggatgtctccttcctgcatctgtgaaggaagaagccaagaccagacccgtatcttttctactgtgtcattcctggaaccccagaggtctggctgacagcacttcacctccagacatgaagtccaccccaatatttaccccaaaggctggccttggtgaggcttctgaaggcgaagttgtctatgctgagtttctggtggggcaggcaggtgctgtatgtgtggcctgaggccactgctcttctctccccagtcctgaggtagaaaacctgggctgcagccttgtaaaacaggtctacaaagggaagcagaaagaacaaggtagcaagatgggaacctccccagccctggggcactcttctttagttctcaccaaggccacctgtgtcctagcttctgtggggtcttgagagaggcttggtgggaagccgaagctctctgctctgtgtctaggttgctggggcctggccaggctttgcagccgattttgcaaggccccagctgagggccttacagtgggcctctgcctgtttgaaaaagctgaggcagccagaaccttgtccaaagccatcaggaccacagagcatagggatttgtatgggccctcccttcttcctccttcccctccnnnnnnnnnnnnnnnnnnnncctcccccttcctatgtcttcctcttgtcttcctcccacccctcctctccatgcctgtcagtttccctcactacaggctgctcacttcacttcttgttccctgggttgccctgatgcctctcaagcctgtctgtacagccggacactcgcacaccctctcctctcagctccccacagctttcctgtccccaccgactcctctccctttctaatcgttttttatttttttattaattttatttattcactttacaactcaatatcagcccttcctctccacccagttccacctcacagttctgcccctcatttgccttagaaggggatgcctcccctctaggtgttacccacacacacacaccatttctagatcttgaaaacaacctggcttgtgctaagctgtatctcctctgtgtacctattctccctccttccctagccataacccaagcccagaactgacaaagcctggttgctagatgaacaggaaaccctatctgtacatgtcccaaccttggcttaaggaattaaaacccgatatggctaatctacgtgcctatataatgtgctgtgccttttctgggtcctgcctcgaggtctttgcacaggttctggtctctaaggatctctatttctcactacgtgactttggataagttgtctaacttctctgagctcccagctccctgactataaaatgggtcgtaatagagtgcttgcgggtccaaggtagtgagagtacgaatcacatacttggcacttagggcagagatgggtccctctccttactccttcagaagctgggcccctcctctccagtcaccagaccacattggctgtgaccttcttccctgtccccgtaaggaccggcaggtgaagactgaagagacaggtctgtagacaggtgaacaggctccagattctgtcctttatagccatatacactgccaggcctgcgccttagggttcgaaggacgtgacagatggctgccatccttctaagcagcagaaagctttggtggaagaacatgacagccagctggtcctttggatcctggggcttagcaactgtgtgagggagggtgataagaccactttcagaacagggacagagcagctcacaagtagccctggtctcagctccaacaacaggtacttgaggccctatgatgaaagacgtccaagggtgagagaaagacttgctagctctctcccataaacaagccctggccacacagagttggtgtgacctccttagccctgcctcagggtccccagattccctcactgaatgtgagcaccagctcccagaagtcccccccccccccggtagtgcttcatggaggtctccggtgcccaggatactcagtctctggagcctgcaccctggctggggaaactttggcaatatagctgttttgtgttacccatgattctcttggtgatcccaataactcagtcacccagaccaccatggccattggagggaaagctgcccccccaccccaatcaggaacacgtaattgtcagtgactaagtccccactgataccaaggaagacactggaggaagggcagagttattcggggaaactgggcttgggaaaggcagtgtttgatatttaccaaagagttaagaaaggcattgactcctcctgactggtgtgggttaggtgggatgccaagaccttgagacaggaggagcattgcctaagagtcattttggttgagtaaaaatcccagagacagaggtgagaggtgagttacccccccaaggttttgtttttgtttttgttttgattgtttctttgtttgtttgtttggggtcaggtggtccctagaggaccccaaactatacaggctgttgtctctgctgttggttgcctgccagaattaggtgcaaagtccctaatgctaaagacactacgcactttgattgcaggacatggagaaactgagataggatagaggtggaagcaaccttccgactggctggcttctgtactgctaggaggtgctattcaggctgatgagggaggactgttgccaatgaacctgctctgttatggaccttgcttgacagactacggatatgctgagcaagatgtgtcagctggtacaacagtggtgccagttaagatgcaaccagtcaccctctgctgagatctaaggctgctccacaggagggaactgatgtttggtacttctagttggggcgaagacctatggccccagcaggttggccccagcaggttggcccaccaactattttattaaatagatgtggcgggcctccaaacatttgtcttctaggcatttgtgcttacccccttgggatactgattctgttagtgtcagtcatggggggaaacttctcttttactagaggcaaagtagagtacgaccagtaacaggtctgaaagtgagtgactgttgctgcagcatccagacacaaagggaagaacacccaacatctctctcaccccactaggcgctcagggacaaccttctctgcagagggaggtggaaggaaggtcatagccagaggaaggggtggccgtgctaggagaggctgctcaggggttgagaaaagcaccgactggtcttgcagagacctgtgctcagttttcagcagccacattgggcagctcacagccccttttaacttcggcttctgggggtctggtgctttctactgggatccacaaacattgcactgtgtgtgtgtgtgtgtgtgtgtgtgtgtgtgtgtgcatacataaaagctttttaatcaaaaaaaaaaaatagaaagtaagtagtaaaaagcaaacagaaagcagctgagaaagttgccagctccataaggcccctctcaaaggccatccagagtaaacaggtttctgaggaagcgagcgcttgtgagtggagctgcctgcacgctgtggctgaggatggagcttttgtgagtcacttacaatcccttgacttcaatcccttgttcctgttgcagtcaccctagaggcaaccatgggtcgataaataacccctcccctattgtacgagtctggttcctgttgctgtgataaaactttgggaaggaaaacccttgggaaggaaaggagagggtttgtgttacaactcacagtccatctgtgagggcgccaaggcaggggctgaagcggaggtgctgcttacagctctgccctccatccccccatcctggcttgctcatcttgctttcttacgcagcacaagcctattcgcccagcggtgggggagggagggcactgcccacaattcccagcaccggttcatggccatctgtcattccagttccaggggacccaactccttcttctagcctctgagaacaccagcatgcatgtagacaaagcaactaggcacataaagtaattttttaaaagaaaagaaagaaagaaagaaagaaagaaagaaagaaagaaagaaagaaagaaagaaggaaaggaatgtccgacagatttgcctacaggccagtccaatggagccatgttctccgctgagctctccccagatgaccccagcttaggttaaggtgacaggaagatgaacagcacatttatgtcctacagatagccccaacaagcctctggttctgtgagctaaccacctcggtgggctggtttctttggccatcatcagtactctctatcttgtgccttcccagaaaagttgcataacgcaatgaatctcttcctcttcctcttcctcttcctcttcctcttcctcttcctcctcctaagacagggtctctattatatagatagccttggctgtcctagaacttgctgtgtagaccaggttggcctcaaactcacagagctctgcctacctctgcctcttgagagctgggactaaagttgtgtgccatcatgcctgtcacatatacatgcctgtcacatatacatgcctgtcacatatatttctttgtatactatccagtatgtaggtggatgcgtgcacacgccactgtgcgtgcacatacagatgtcagagggtcaccctctggagtctgtccttccattgtaaggttcaagggattaaagtcaggatgtcaggcttgcaggggaagcattttcatcccgctgaaccatcttgcaagcccctcaaaacacttttaagtgtcaaaaaacccaccttttactcaaaacttctcctctattacagccatgtcattcatatggccaactcatctgctccagattctgtagcatgcccaaggtgaaacaaactagataaaacctgtactccggacaatggaagctccctcatcttgcgccacacaaaatagccactccccaccgtctggtgatgtctggaatctgtgtgaagtctcacaagagataggaaatctaatctaggaaggaattacaggcacctgccacagaacaactcaggggtaagaatgtgcttccggcacggtttggtcaagaagctcacagctgtggagcactgcctgggcttctcgtccattccttcctctctcccctcctcacagtgttggctgggtgtgcccacttggagctgcgatggctgctgagtcccaacactccacttcttcaccaccctggaggagcctgaagcagctttggagctctgaggtagacaagcacaccttctcagaggtgcttggacatcctatgcaggaagctctgaggagtcttccagcccgaggctactgtctacctttcctccaagattgaaacatttcatcttgcagagaaggggcttacgcgaatggtcaactcagaatggcttcaggaagtccacgaccctaaccaggttcttgtagctccttcttgccaagtcaagctgctgagagcccctctcagacaggacaagccgaaaagaagaccagaccagctgcctggaaggagcagacacccgctgaccggcctggaagaggtttagcccaactgagtcacctgaagagagtactcatcatcctgctgagctgcctgtcagccatgcagtccttccagattcccagctctgtgagctgtcacccaggctgcggtgggcttcggtgaggcagctgtctttgagtcacttctgttcctgtaagtaacccctcggccatattcctaaagataaccccagctaaactcattggtgcaccaagttggacttgggggtgtccacacgttgtcaagagcttcctctctggggtgagtggaaatgtaaattgtgtctcccgggaaaagctttgccacacaacagaggcagaaacagagtcaagtagaaagatggccaggagggaggattagacctcacagtatcccagtgactctgacgactaaggccacagagaatgggataaggtgacagcagtgacctgagggagtttaggaggcactggatgcacagggcacaggatctgtgctcacagatgctgaatggtcacagcctctgagtcctaagagctctatgtacccaatcaccatccagccctgggaccagagtgtctccattccaagccaaggccaggtggccctgctgggagctgggtggtatgtctcccaacacacccccaagtgtctaagaaagggaggtgttccagacaaggcaagcccttgtctttccatctcatccgggctgtgtgtctggccacccagccatccctcttcctctggcaggaaagccattaagctgcagaccccccaagcaccggctgcagcctcagcactaaatgcatttgcacccattagtgagaagcccaggctggctagccggggctaatgcacagctcaccctcaccccactccctggagacagctggccaaagccccacccatgtgctctaagaaaggaacctggggcctccaggacccacgtggacaggctgggctgcaagtcagtcagattgcctctactcttaagggctgcattccacgtgggagatgacacctatttgtcacaagcatgaaggcatcggaggggacagctgtgactgcctgggtggctggtagaaactccagaagcccagagccttgtgttatcatagaggaaagaaggcaacacacacacacacacacacacacacacacacacacacacgcacacatgcacacacgcacactagtgccagagactgacactagtgtgcttcaagtcactctccagatgtgtctctcttggctggactggctggccagtgaaccccagagagctttctacgtgggggtcagggacactgaactgtctcccaaactctgttatcttttgaaatgatgttttttaaaaagccagtcacctccacctgagccttgggttttatgtaaaaaatgactctcggtgatgcagaggtacagactactcaggcaagcagacaacagcctgtcctctgctgtcagctctccctgatggaggagcctggtgactcgcacatgtgaaactccagccggaatcttctgcagctgtccctcagctacccagagtctttggagagggggcgtgagagccacagtgtcccacccttgccttataacacctaaaagagatcagtaagttcttggagggttttcctttttgcctctggcgagggtatcaactcagaatgggtaagaatgccagggcttaagatgaacgtggtgagccaggcagtggtggcacacgcctttaatcctagcacttgcagnnnnnnnnnnnnnnnnnnnnnnnnnnnnnnnnnnnnnnnnnnnnnnnnnnnnnnnnnnnnnnnnnnnnnnnnnnnnnnnnnnnnnnnnnnnnnnnnnnnnnnnnnnnnnnnnnnnnnnnnnnnnnnnnnnnnnnnnnnnnnnnnnnnnnnnnnnnnnnnnnnnnnnnnnnnnnnnnnnnnnnnnnnnnnnnnnnnnnnnnnnnnnnnnnnnnnnnnnnnnnnnnnnnnnnnnnnnnnnnnnnnnnnnnnnnnnnnnnnnnnnnnnnnnnnnnnnnnnnnnnnnnnnnnnnnnnnnnnnnnnnnnnnnnnnnnnnnnnnnnnnnnnnnnnnnaggcagagaggcagagaggcagagaggcagagaggcagagaggcagagaggcagagaggcagagaggcagagaggcagagaggcagagaggcagagaggcagagaggcagagaggcagagaggcagaggcagaggcagaggcacagaggcacagaggcagaggcagaggcagagaggcagagagagaggcagagaggcagagaggcagagaggcagagaggcagagaggcagagaggcagagaggcagaggcagaggcgcagaggcagaggcagaggcacagaggcagagaggcagaggcagaggcagagaggcagagagagaggcagagaggcagagaggcagagaggcagaggcagaggcgcagaagcagagaggcagaggcagagaggcagaggcagagaggcagagaggcagagaggcagagaggcagagaggcgcagaggcagaggcagaggcagaggcagaggcagaggcagaggcagagggatctctgagtttgaggccagcctggtctacatagtaagttcctagatagccatggctacatagcaagaccctgcctcaaaaggagaatgataaggaacaaaagaaagattgttgtagctggagagactcctcagtgtacaaatgcttactgcctaagcaagaggccagacttcacacccagtagccatggaaaaggcccttaggaataactggagacaactcccagcactagggagggagaggcaggcagatctctgagttccaggtcagattggtctacaaagtgagctccaggacagccagggctacacagagaaagccttgaaaaagaaagaaacaaacaaacacccacagaaataaaaataatgtgttcagggtcacatacaggaggagcaggatctgtgctcaagatggccaccagggacagagaggggcgggcacagtcaggccacatggactgccgtgctgctcttactgactatgtgtcctctgctgaagtggggatggggaatgaatccctttctctcatgattctagggcctctgggacacttagaggctcttagagattcatgaagccctcccagaagtgagacctcaccaggcaaatggtgtactctggtggtgctccccagagtgctccctactgcagctgcgttagttacaccaggagggcaccagcctggtggagggctctgtctgcaatgggtgtggagacccctatttcctgtgacttctgcagcccagccagcccatttcttgtccctctgcttctccaccacactgctcaggctatggctcccgcttcagagcctctcccacccttacatggttcaacatggagcccattcagcttctgactgcagccatgccatccctcacagcctacctctctctgtctgccctctcagattatgtaactgagtcccaaatgatcaggaaagtatgagtatgagccttctagaatcttccatatgctctcagaactagacctatgtctaccacacacacagctctgaggactgagaagtatatcttttgttgtcagagtctacatagatcggcctgacctaaaactagtggcaaccctccggcctcagcctgcccagcgctggcatcatgggtatgacactttgccaggctcccacctccccattcacagtgctcacactctcccaagcgtttaactacctccacttttgccactgtccccacccatgagctggcagcagcaggactcagattctcattttgtttgcttcatcttgagatgacctggctgtcttgccagtcagagggggaaaagacttcttctatggagtccaccccagagctcaggcctccctccaagtcctggacccctggctacaaggggggtgtctcactcaactcaccccattatcatgaggccagtcttcccctcccccacaaaacatggcctctgctgacagctgacacagtcttcctatccccacccccaccccacccccacatctccatgccctctcactgcttgcaaacccatgtgtctggcccccacatcccctgccctggactctggctgacacccacagaggaatccgcagctttctctgtatggttaaaatggaacccacctgaggagagtggggcctaggaatctgcattcatatacgctctcttcagagcaagggactaggctccagaggccacaaatgctgggtgggctgctgagacctcagctctgcctccagagctcctggaggttcccgtctctgtcctgttgtagctactggctgtaggttagaccttcagcaaagatttgtcatctctgtgactcagggtctgttcccctctgcctgcaacaaggcttttcttgtttgatctctgggaaggaactcttgttcatccctcaaaacccaacctgtgctgggcagtggtggcgcacgcctttaatcccagcacttgggaggcagaggcaggtggatttctgagttcgaggctctacaaagtgagttccaggacaaccagagctatacagagaaaccttgtctcgaaaaccagaaaaccaaaccaaacaaaaaaaccaacctggatgcagtggtggcgcacacctttaatcccagcactctggaggcagaggcaggtggatctcttgtgagtttgaggtcaacctgatttacatagccagctccagaccagccaaggtgagtttgtcaaaaacaagcaaacaaacaaacaaaaacccaaaagagcaaaaaaacaaaagcaaaaaccaacaaaaccaaaacaaaacaaacaaaaaaagcaacaaaaaataacacaacaaaacccaaaacaaataaataaataaaacaaagcaaggcatctcactcccaagctcgctagctcacgcctgcctagctggaatggtttcttctgatctcttccaggcaattcagcatcagaggcagacttggctctggcccaagccctcctcttaacaaggcctaggatcttccgtgctgtgggtacagtgagcactgaccttgccttctttgtggggctgccttggggtggaaacgagacagcccaagtgaagtgctctatggcagcctgctgaactgaccactctgcctccgaaccctgggattcagggtggggtttctcccaggagtaccagtttgggggtgggctcagccactgctgtcccttgctcctggaaactgtccctgagtgtaatcaacactgactgtgccagagggaaagggctgccacctggtgtgagaggggacattaaggtccactgtgggagcacgctggtgggctctgctgctcttcccctagggagagctcagttctgaagagagcagggtgccgcaaggcaggaggcagggccccagctgcacacacagcccaggcaggatctcttgatgtctgagctgctcaggagaggcggagacagcggtgcctgggagatggtctccatggcaaccactgccactcactccccatctcctatgtaaattagttacaattttattagtgtacagaatttcagcaggccatattctgccttggaaaggaaaggggctgggggaacagagacaagtgtcgagggctttctagtccccagagaactgcaactctgtgatgtgtccgtacagagtgacggtcacatgtcctcatctgtcttccagccagctcccagggttggggtcagcccatccccggagaggaagcagagtccatttccccatcactggcttcttgcagcagcctgggagcccccaccccgcacagctgaggtcgttagctgacccactagtgctggggtcagcatgggcagatgcgcttgctttctcctttctctgcagatcaggggtcaaggttcacagggcactggcgcacagcagcagacaggtgagggctcacagactttgggcttctaggaacagcgcaggtccccagctacaagactcctgcatggggccactgcccgtggcggcacatccgacctggcagctgcaggcagatgtatgtggcggtgacaccaacgcattcagtcatacctacaacacacgtgacacattttcccccaaagagagaagaaaggcacagagttatctttttcctgaggctgttgttaaaattagtcgcacctcctatggctctcgcaactctgtggccctgatcttccctgcagagtttgctctggggaacccggggccccagcaagatgcctgtcaacagccataccagtgcccaggaaggggcagtatggcatggcacctcaggcgtggatctaggtcaggataagccttacagctgtggttcccaagccaaaacagagaagaggctgcctggctgagggaactgctcaataaagcttagatgttagcacagactcctggaggagggggcgggaggatagagtggggaatggatgagagggggaagggagactgttgactggtggatggaaagagagaaggataaatgaaggagagaggagaggatggtggggannnnnnnnnnnnnnnnnnnnnnnnnnnnnnnnnnnnnnnnnnnnnnnnnnnnnnnnnnnnnnnnnnnnnnnnnnnnnnnnnnnnnnnnnnnnnnnnnnnnnnnnnnnnnnnnnnnnnnnnnnnnnnnnnnnnnnnnnnnnnnnnnnnnnnnnnnnnnnnnnnnnnnnnnnnnnnnnnnnnnnnnnnnnnnnnnnnnnnnnnnnnnnnnnnnnnnnnnnnnnnnnnnnnnnnnnnnnnnnnnnnnnnnnnnnnnnnnnnnnnnnnnnnnnnnnnnnnnnnnnnnnnnnnnnnnnnnnnnnnnnnnnnnnnnnnnnnnnnnnnnnnnnnnnnnnnnnnnnnnnnnnnnnnnnnnnnnnnnnnnnnnnnnnnnnnnnnnnnnnnnnnnnnnnnnnnnnnnnnnnnnnnnnnnnnnnnnnnnnnnnnnnnnnnnnnnnnnnnnnnnnnnnnnnnnnnnnnnnnnnnnnnnnnnnnnnnnnnnnnnnnnnnnnnnnnnggaggaggagtgggagtgatggggaggagtgggaatggtggggaggaggagtaggaatggtagggaggaggggtaggaggggtggggaggaggggtgagagtggtgtggaggaggggtgagagtggtaggaaggaggagtgggagtgatggggaggagggttagagaatgacagcttgatgtgtggaactgtagacagaagggtaggcaaaggaatgggtggaaagatgaagggagggtggcagagaaatcgggaggctgggtggcagaatggacagaagaatgggtagagggtggctagaagactgtcaatgtggccaggcttgtatgctaaggcagagggtacagagctccgactccagctttgccaaagcatcagagtccgctgagcctcagctctctgtatggagaagggcaaacaggtaatggccctggcctctagaatgcctttaaaatacccaggccagcctgtgcacacagtgagggcttaatgcatgtttactcttatggggacacacagagagtatactgggtcttctcttggggctctgagtcagctgggaagggtgactagtttagactcaggttcaaggagggggaagagggtaggagcaggtagggctctgtctatggcccccagtgggcagctttcgatggcaaatctgggggaagaaggaggtcagggaaaaccaagccttggagggctggagtccagggagaagaggatgaacagcctaaggtctggctctgataactgtagaggagacacagtaaaagcaagagatgcagaggggtggaggctgaggcaggagcattgcagtttagaagacctgctctcacgctgaactcagctttccatgcgaaggctggtttccagttgtgcgtctcgcctccagttctggcgcaagttagagttggccccaggtgggcaaggagatgtctccccttgcccctgtggtgctagcctttcacagtaggatggggtacccactgctggggagaagtctgggtctcaggccgtctgggagagcacgcggaggtgctggccaaggtcctctcagggcctcatgtttgcatgtgcgcatgcagccaccagcctgtggcctgaggtggctgaacagtccccagtcaaagggctgaaggctccagtgttgtggtaacaagccagacccttccagtgctcagtcccagctctatgaggaagggaaggaactccccggattcatggggcttcattttcagtctagggccatctgtgagagaggccagacacctgcagctctcctcgaatggacaagaaggccacacagtcacggaggttctgtgtccctagccctccagctgccatgttttgtagccggaaggcctagcctcctgacagacaagggaggatgggcccgcccaccctgttccgtggtgtgtcttactaattatgccacacaccggaaaacttaattaactcgatgcttggtgtgtaatttccactagtttggaagtcaggggaaatcaaacaaacatccacatggtgctggcagccacggtacctcactgaacaccacaggcctggctgtggacctgtcctgaggggctgtgaggaggcctctgctctcgtgctctcaaaaactattatacatatgcagagatatccaccccaaccccacatccatacacaagtccatacacatctattcccatctatatacacacaaatccactcacacacacacatacacatatatcacatacactcatatacctacaccacacatacacccctacatatacacccagcatatcctgcatataactcagataatacacatatattcagcatgcacatagtcacatataccccatacatatacatacactcacatacatactacacacaacacaaacagaaacacacaattgtgccactagaacgtgtcaggaaaagccagagctttggagactatgtgggacactagaatgctggctctgtcctcggtccctccagggcccctctccccactcctgctggggccacccactctgccccatgtgtgaggagatctcagcagccatgtgtgtccaggaaggaaacagagaaaagcaggacagcagaggaacccagtcggtccaatgactccccgatacctctctggggtctaagtgggttcaaaacaaggcagccagggacaggaagggtgaggtgtaggcagagctcgccagcctttataggaagtcaccttttatactgaagaagaagctgggcccacactgtgaagtcagtgaccgagaccctgacaaccttgcccacaggatttgaaaagaggtttatctgccatgggtgatacctcagaaaggtacctgccgtggagagactaaggacagacagacggtaccagggcatgtggggcagctccaacaggcagcataagatcagaggctgagaataccccagcaaggggacacccagatagtgtgacagtgttcagatctcacctgcccacttacccatagtgctccctcttcctgcaggccatagaaggttccaggtaaccactgagggcttggaatggaaactctgggtgaaggaaacacaggattgtgtgtggagaggttaggtagcttggccagggtcacatgctttggaaggcctggctgcctctgttacatacagagaccactctgtcactttggaggcacaacgctggaggctaggtgtatctagacccatttgcctcttggggcaggaggtcaccagccacccctgagccagtgggaggggttcttctacatacctgggtgctgctgcttctgtgtcccttgctatctcttgcccagcctggctgacacccttccccaatcacccgcccagcctggggccacctggctgcagggtttgaatcctgcttgagggactggagactcagctatagcccagtcctggttcccctccaagagaccatgtttctggatcctgctcaccattcaggttttaggttcaaagctacctccttgttgaagcatccctggccctggccatcatcatggtgagaccacatgggccaggaaccttcctgtgagttcttcctttgtccaggacccctgcaggtccagaaagaggctcagaggatatcatcaaatgacttgaatctattcagaaggacaatttgtctctctgccacatgccaaggactagccagggacttctgatatagctccatggaacccaggcccacccttaggtgagtgtgggtgacaccctcagcatgcctggcaaaggagccacctactcatcctgggactctggctctccatggtgtggggggggggggcacccaatgactaaacctcagaatatttgtgccccagaaatttctccctcatccctatctttctctaggcctctttttacttcccccacccccacccctcaactctgtctctctctccctccctcccttctgcccctctcccctccctgccctccctctcctccaagcttgggggccctgcccttcatctggctgcagctctgagatttctcctctggttgtttctcttctccatcttcttcctctccacctcaccctgtcccggggaggggctggcggcccgtgatttgcagttcccagggcggtcgtctctgaggctgcacatctggatccttaggacgctctggaaatcaagaggctgcctgagcgggcaaagtgccccctcccccacctcccctccttcccaccccaagccggtatttttagctctgcggagcatcagtgtgcagggccggtgaagcctggatgaggttttatctgttgtgacagccccaagggcagtggcaggcagagaggctttttgcttcttgagttggggtgcttctctttcggtggagcccccaaggcagggttggtctcagctggaggggccagctgtctctgtccaggcccactggacctcgttcccctcctctgtcctggcttggcctttgtccctggaaggctcctcgctggagctgcctaccatggttgcctagattctctcccttcttttgtcttggctttcttttccaggattccgccctctccatccaagccttcccttctgtcagcctctttccctattctcttgaagttagcagtgagcacaggacttctcttcagtctgtccctcctgctccccagtggcccccccaccccttctggtgttcctgcttcctgcctccttttgcctctggcagcctctggggagctcaggacaaggcaggatgggtaaaaacccctgagcctgggctttcgagctttatcttcagggaggacccctggacatttccagagttaggacggtccagcctggtccctataaccgtaacttttattcacctggtgtaattgtcctctgagccttactgcctccatctgcgaacccaggcctagacctggaagcttgtactctctgtgcaatccgacctaagcctaggatgttttcaacctctgagacttgctgctgaataagctcacctttcctagttctttctgagctcttgctggctggttcaactcagctcttcaaactcctcccccagctgactgattcaatctggcttctctcggcttctcctgaattgctctgcttggcctcaaactatctctggcaatttgttgtagttttctggctccttctcattctctggattgttctgtcttcacctgtgtctagctccttctttctctccaatctgtctctctataactgtcccagtaaaagctgcctttcttttctctgcactgcccctcactagcttccctctcctctctcttctcctgagagttgggaagatcctattctgtctaatctttctctgattcccatttttttctgccactcaattagatatcactttcaaacatgggtgtttccttctacaaactaactttaccttcattgtttggggttaaaggcgtgtacaaaggactgagccacaccacaactagaatcaggtttgtttgtttgttttcctagtaaatatcacaatcttggggttcccattgtgataaaatatcctgcaacatagttcccccacttccaactttcaagtcctcagctccctgggcaggcccctcagcaatgtccactctggctgtttaccatccatgtgtctccctggaccttagctggtctgcatcgccagatcacccgtctattcttatagactgtgagccttgaagaaaccacaactttgcctcctgaagcgaagaggagtttctggcaagagtctgtgctcataaatatggatgggacatagaaaagagtgaacgctactgctgccaccaccgttagtgctcccggaagctgaaggaaggtggcggtggcagcgggacctaaagcaattgtatttaataagcaaaaaacaactgccgcctaacctggcctgtcttctgccaaagagcaaagaccaggggcttctgctgctatggttaccaagcacagctgtgccaaagaaaggcaaggccagccaggcataggagatgtggtgatggagcccaatggagtccatcaaaagcaaagatgacttcaccttgtctccactgagcccagatgtaaacgcaggagggaagtacggtcaatcaaatggtccattttccctttgcacttctggaggaccaggctggcagatcaccaggctctaccctcagggtagctgctggcagctgggaggagccaaggacaggcactgcagtgtgtaaaaacagcaagggatcacacgtgaccatgaccaaccagaggaggcaggtaggagggagggatgggaaggtggccgtgttaccaccctcctccctctcctctgccctgactccctgccacctggcctgaccagcgccaacttctgccctctgcagcctggacaagagtccatacaagcaggtttcaacccgaggccaggagagcagaggctgccaggagccttacagctggcaagtgagctctgaggagaaggcatggccccacccttacccttcagtacagtctcgctgacctccagagagctgtgggcatcgaccactgcaccccacatagcatttgtaggaacttggggtccacagccaagacaatctgcaaatccctgtggctctcatcctcagggcctcaaggatccaatatcgctgaactggcaagaatggtggccctgtggaggacccagtcctgacgctggcacttcaggagccttatttggaagtaagtctttccagagttaaaatgagtcactctggtaggtcccaaccaagaccactgtcctcatacatatgggagtattggacacaggggtggaccttcccaaagggaggaggtggtgaagacacaagcaacaggcagccctgtccatgtagatggaggacatcatcgagagctagagcaaggagcaaggcctgggaccatcctgctggggcctccacttggtcatggtttctagaattagctctagaaaactaaaataaccacgcaagcattaccatcaccgtcgcaaacaccttcattaatatcaccaccacaacacccaccgccaccaggacaccagcattcacaccaccatcactcaccaccatcatcaccatcatagctgtcaccccaccatcactgcccaccactatcatcatcatcacaaccatcatgatcaccaccaccaccatcaccatgcggccatcagcccatccccacaccccaccaccatctccggattggtgttaggctttgtggatttaacagcacacatgtcctcgcagctctggaggctggacatgggcaatgggtgtcaggagagctgtgctccctcttcaggctttggagaggggctttctttgctgcctctggtatgtgagggcttcgggtgctcagtggcttgtggctctgtgtcacttccctctctgcctgagtctgaatttgctcttgttcccccatgtatttattttttgtgtgcacacatcacagcgcttgtggacgtgtgcagaagtcagatggcagtctgtgggagtcatctctccctttctgccatgtgtgtcccaggtgaaacatggcttgccagtcttggtggccagctacctcacctactgagtcatctcactggcccatctcctttcatctgacattgattttattttatgtgtgagtgtttaccttgtatgcatgtgtgtgtgtgtgtgtgtgtgtgtgtggtgcccagagagctcagaagagggtatcagataccctgagactggacttaacagcaggttgtgaatctccaaggcggggctgggactcacatcctggtgctgtgcatgaacagccagtgctctaaactgctgagccatctctccagccagcatcccgtttcttacaaagacatttgcgatggcatttaggccccacctggctaattcaggatgctccagaaccttaaataggtctgcaaagactctttttaccaaatgaggccatgtttgaagccttctgagattaacacagacatccctttgggggcacatgcagctcatgacagcaaggctgagggacacgcagcgcagaaacttttcctgtaccctgttcctcagaccaccttccgcaggagccatcttccttcaacacacagcgttcttgacagggaaaactgttcagtggagggagggtccatttagaagcttcagtgtccctggctcctctgctcacccaacctcagcctctgaacttctggtgggaaagaatgtatcccagaagaaacaattgtcatgaggagagtcaagctctggggtctctcttgaggtgtccctctgagtaaagcagtctgtcccttgggggtcttaagcttgctcatgtgtcaaactgcccacaggtgtggctagcaccttccctgctagtacctgctgctgcatgcagcctgttccccggggaggggggtgagtttatggggtgcacactgatttccaggcatgaggaactgcacacacactcttcccccagcctgccctactctagactatcatcagcaagggcactaagtctttctgggagccttttcttcaaggctgattcccagcagccctgaagatcactctgtgatggtccaggcgacttaggaaccacccgtgcgttgtgtgtggagagtctgaggtgttcgtggggctgaaggagcccttgttaattaccaagaaatgaccaggaggcccgggcccaaagctctgaccttgaaagggcaatggaatcgaactaaaaccctgtagcagacctaggacgaccctgacttctgtttctgagccaaggctgagggctggatgtggtctgaaggcagagggctctctttgctggaggccttaggctcctcccggcacacaggaaaaaacaacctgggccattctgggccattcattcgagctgtttgtacgtgcaaatatttattattattattattattaaacgtccacttcctgtgcccgaggccatctcctccatccctctttccagcctctctgtccaggaccagagtcataactgtttgcatttgggctaataacgacctgggagtttggaggtggatatgggcaggactgtaaactttaattagcctggtgagattaacatcgtagcaggggactggagtgggggcctccttccgagctctctgatcccagtagacacccccctcccgtgaagggcaccccatacaggatgtgcagaggaccgcacagcaaggcttacacgtgctgagttaatctttattcgcctcgaagccgagtcaggcttcaaagagccctgggtcgaattgctgtccctctggctccacagtactcgctggcttcctccttgcagaaacctcaagcagaaaactcagggactgggctgtgtgaccttgagccggttactcaccctctcagggaggggaggctaagtgggaaggttcaggacaaatgctgcggaatctaggaagctaaaccctactgggtggccgaattcttactgcctggctgcctagcctggggggtcacacgttcaggaagggctgaggattttctggtctccatctggcttagtattgagagcattcagcggctcgggggctgtttccaccagcgtccccaggaaattggccttcccgagaatgaagtcatctgcttctcttttatttatttatttttgtcgcctttttctccttcaagcatgagcccctgggcctgtgcggcccctctccacggctgtcgcgggagaaggggctctgagaataggtgggaccccggggtgccacgcgccgtcctgggactggccgaaggtgagctcccgggcggccagggcgaacaataacagtaaataacgctgcctcgtcagcgtcataaaaacggaaacgcttccactgtgttttaataagcgtcgcccatcaatctgcctccctgccggccgcgggcaccggggagggtgcgggagggggacgagggggcgcgagcggccggggtcacgcgcaccagccgagccgagaggcggccgagctgagtaactccgttgccatggcgacgtggccgcaaggaacaggaagcagcagaaatagcagccgccgcggcgcggcccctccccccgcgagcccgttgccacggcgaccggacgggagcgaggctgcgcgggcggcctcctgctcagccgactgacgcatgcgcagtacggcgcgcgggtgggcctcgccctacagctcccggggtggcccgtggagaccagtgctactcgggggtcggtgtctgctttgggagccttctcgcctcggcttctggcaaaggcagtgctttccaagcatgcagcgggcagggacgtggtcaccggagtccccgacctgttctgagtgacagcagagccgggtccaggcttccctcgccgtggatggggcacctggtgacgtccaggatgcctcctcctcttggtccccatctccacgtgtccctttgccagatagaacctgcatagaacacagaagccctggcaccctccatgtcccctcttgtgccagaaaacaacgttctttcctccacaccccccaagttgagggaagcctagatgtttcataacaaaagccctcccccacaccccataatagcttgtttatgtggaagcggctgcagccttgggggtctgaagctggtgtgtgtgtatgtttgttacagggacacacgtgattatatctgaggccgtttgtggagaattttcttctctgtagattctgtttggtttgtttttaataagggtcagaggtctgagcttctgtggggaagggggaagggtcacctcggatggccaggccaaagggtcccagggggacaggtcacggggcctgcaatgctagcagaggccagcagctaaagctgctccatctggctctgttcctggcggcaggcaagcacaggcagccagcaggatgctcccttgagtggagccccagagggggacaccctggaacggagactggtctccctgggcaggacagctgtcatttctcaactgtccaagagagagagaagggagctgctgctggctgggtctttctacagcactatcaatggcgggcttgtgtatgccgccttcaggttggctgtgtgaaatgaagggagccttgaactgcttccgagtcctggccagccagcccagtgtgtggaccgagggctacaggctacataagagcatttccactcaggacagcctagctctgtgtgtctttccctccttcctcaccctgtagacatggcaggggcgggggggggggggctgcttaccctgaaggagagcctgcctggtgtccaaagacaatgcatccaccatagagatcctggggtcacagttaactcttttttaggggaagctgtggagatgtggggaggaaggagcagagagactgggctgtaattcagagaaggtccctgtccttgaggccaaagcagactgagacctgagatgacaaagcaggccctcgtggcttgtgactgtccctggagggagatgggtgctcagaatccgacgtctatttactgcagctggaaggggttccttcgctgtcccctggtccctgagacctaggctgactgtgtccagaggctataggcttcaggggttaagaagcaaggaggtgggccttggctctgctactaaagccccgtggaatcagaggcaggccccgtaccttccttgggcttcagttttcccatctggcaaacaggaagagggtcaaggcagctactgactgcctcatagttgacccagtcagtatttctgaggtctgaatgtcctataccgccaatggtatcttaggtcaggctcagggatagtggcccagaggagtgaagtcactccccaggaaaagctagaaggtagcacaggcacctgccacacccgcaggagagcagggatcacgctgtgagtgctacagtcacaagtcagcacccccctcagcccttctcattttggtggctccatccagagccttccctttgtatagagttgggacacccattcctcctttctgaggttagcagagggactagaactctccgtggtgtctgctaactgtcatgagtgaagggtgaccgggagggtaggtctccaaggatacgtgctctgcacacggctttgcagtctgccccagagcttgagatctgtgtgccttctcccctgtcccttcctgcagctgatatggcagggctgggggtcctcactcactaggcaagcgtgtggcatccagatggtgtggttaatcgcgatggaaccgtaaatcagcggtattgtcccagcctccctgctcttggcagagccgtcacctggaggaggagctggtgtaagaagctcctgcagccccgcccaccagccccaagctttgttcccagtcagtggccagtgtctgtgtttgaatactagccctgtcactgcctgtgtggctttgacgaagccctgatctccctgttagcctcagtttcttcatctataaaatccgggcgatcacagcgcatgtggtccccagaacaagatgaagtctctcatgtgggccattcctgacttatagctcagtagatcctccacaagcttatagctctataggtccatccacaagcttgtagctctgtaggtccgtccacaagcttatagctctataggtccatccacaagctgcctctcacctcttggacctgtacaggaacctgagagtcagagaaggaaagcaagctgcccaatgccacacagccaattagcagaggaacagggcttaagcctggcaggctcgagtgacactaaacacctcgggttccagtcagcccgccctccccagcccctctgcctatgtcggtagtgacagcagagcattgttagcctcgcctagagccactgtgcaacccaggtctaaaaagacgccttaataggttcctaataaagcttcggggacggcggcttcccagggcagggccagggtccaggtgcagcagatgcgacctaatgaaaatgtcagtagtgtggtggtggtggtnnnnnnnnnnnnnnnnnnnnnnnnnnnnnnnnnnnnnnnnnnnnnnnnnnnnnnnnnnnnnnnnnnnnnnnnnnnnnnnnnnnnnnntcaatcttcctgtcctcggctgagtcactggatgcaggggtcactcactcatccctcctcccatcccatccatccatccaccccaccaccacacagtggttatggaacatccttcttgaccgaagcccacattaaatgtacaggttcctctcttcccgttaaaaagacatgagatacacaactgggcacagctgaaggagagagggtgtcagagggtctgcgagagccgtgtctgcagagcagccttggtcaagctctggggagcttgtcagaccgctgcccttccaggccacactctctggacctgtttgtcagtcaggctgctgtgacaaaatgctgtactctaggtccaaccagcctaagtgtatctcccagagttctgaggcacgggaatgccatgatcacactgcaggcatatcctaaacctggtcagggcctgttgtcctggatggggtcttctagccgtgcctgagtgtagtaagggcggagagagctcctgtttctcctcctccttctctcctttctgtgtcccttcctctttcgttcaaagactccccatgtagccaaatctcgccttgagctccacatcctctatgcctcagtttcctgagattacaggggcatgcataccacctctctgtggtccctgcagtctctttgttttattagtacatattaatcatacagagtggtggtttccttgccatctcaggccacatttatgaggaaactaatcaacctgcatgggggaaccctcataccccagcccccaaaggccttaaagtacaacttcctaacaccacctccataaaagatgttttcattgttacatttgtgcgtgtgtgttcttgtgtgagcgtgtgcatgtgtgtgcaggcatgcacactccacacgtgacagtcagaggacaactttttggagaagggtctctccttcaactgcgtgggttctgaggtctgaactcaggctgtcctttacctgcctgccaagccttcttgccagcccaggataccacccgcctcctaaaccctgatggtaagattatgtcccagcatgtaaggctgtgcattcacaccacagcagaaaagatgggttgtggcattccaaagtctgcagttctgaagctccactcagggtaagtgaccctccaagttacctaccaactcttctaaggacccatttggatcctaaagctctgacctaaaacccagggccactctgactgacatgagcttaaccactgagctgagtggagactggctgttgcctgtcgcttttgctacccggtcgaagctccaggaacaggccgcgctaccagccccacccagattcccttgaatgcatggataaaaatccacagacacactcgatcacagggagccatggaaggacaggaaagagacaggccgtgagcactgggcaggagccggggccaggcctcaggttatgaccctcaggctccatcaagtcatacaagatgcctcgaggaccctgtggctgttgggtcattgctgttgttgatgtcacaaaactccatggcaaagaaggggctctgaagtgacactcatcatgaatacttgtagtttttctcttaagaaaaaagcatgctaggcttggtggctcacacctttaatctcagcactcaagaggcaaaggccagtggatctctgaattcaaggccagcctggtctgcatagtgagtttcaggacagccagggctatatagtgacactctcccccccccaccccccccactctctctctctctcacacacacacacacacacacacacacacacacacacatacacacacacacaccaaaaaaaaaccaaaaaaaacaaaaaaacaaaaaccaaagaaacaaacaaacaaaaaaataaaaaacaggaaaacaaaagcaaagtgtctggtttattctgggtccaggtgttagaacggtgaaaaccatatcctgggaggacagtgagcagatcactgttagtgcccatcccacagctagttgaggctctgtggatttaaggggaaaaatgctgtgatccattagtaatgcctgctatgggcatggtaaggggagcaaaaggcaggacattggttggccatgtcgggaattcagattaagaaggcatttagagatccttgtgatggtggctgccttctagagagccctgggcaaatctgcgatatactgcctgcctcagtctaccctttagaaagcaaatatgctgacagaggactcatggcatctggaggatcatgagttgaagttcacactcatatggggctcaggaaccccaatctgctgtagtctaagtctgggccatggcttccccataaggtggtggaacagaagaggctgaaggacccaggcaggatgctgggcttgagcaacacggggagcaatgagtacagctttctcctttggtgggtatggacacagagcacccctcgaaggggcagaagactccccaaggctacagaggacagcgttctgtccgtggtcctttgtcttgcagaagagaggacccaaagaccttcaccttgatcataagaaatggaaaagccttgggccttgaagacaggagtttgtcttagttaagatgtgggcgacaggctgtgtggctttaggtgtaattgcctaaaccctctgagcctcacagcacttgtgaggatgggggaaggagcactgttcaggacgcaggtgtcctgacacacctttaagtcttaatggattagagcttgtgttaagattagggggctgtagataaaatagaattttatgcaaaagtggtggcttcatcctttttatttgttctagaaagatccttagtattgtgaaaaaacactacagctgactgcctcttcatcaggtctggaccccactacatcctggtgcaactccagaaggccaagctcaggctagaacaaggtggccagtttgcaggccatgtttcctggcagggaaaattaattggcctgtaatgggaaatagtgtttatcctaattagcaggaagttgaccaatttcttaataaaggacttcacaaaggctctaaagtcgggggtagtaatgtggggggggtgcggtgagcagggctgacctctccccgcttcagtccaagaggggacaccaggccttggggtactggccttgctggtgtgtctcctccctgggaactgaggtagcaggagggagagagcaagggaaggcaggtgttatgggaggagccagctgtgcccagaagtcctgggtagggtttgttgtttgtttgtttgtttgtttgtttgtttgtttgttttatcaatgtgacacagctggggtcatctgagaagaggaaattcaagtgagaaacagggccgtccacaggcggccctgtagaggctgtgggagcatcttcttgatagacgttgtaggagagttggtacactgtgggcactgcccctccagggtgggcggcctgggtgctagaggaaagcagctgagcaagccaggagaagcaggccagtaagcagcatccctccctccctggcctctgcctcagctcctgcctgcccttctgtaagctgtgagcagaaattaaccctttcctccccaagctgcttttggtcgtggcgtttatcacagcaaaacaaagcaagctaaaaccaagagaacctacccacagggaacagcacgggcccctcttgcctttgcccttctctgcacggtttggttgcacacaaacaggttggacctaaggttgcctcctttccttctacagaactggggactgcagctcataaacaaccccatcctacagctgtgggaacagaggcacagagagagttggcaccctgcccccacctaccttgccgtagccaagcgcccttaggagtgtgcaaaatgaaggaacgaataagttcatggcaaggaccaaactgaaggacagatggcccgtgtcacctgccctcttcctaagatccccaaaggacctcacagggactttagggggaatcctgattatgtgaagactcggggttcacaagccacctcatagtacttcagagatctatctgcctcatgcactggcagaggaagggacctggcactcccctcccctgctactccttagagtccgcaagcttcacagtccccgaagagtggacctcgctcatcctcccggactaaacccccaagccccagcctcatttataaactgtttagacagtgctttctatatactagccactgctctaggcatttaaaaggtgtttatcctccgtgtgaaggaggtaccattatgtggccattatacagataaggaaactgaggcacagagaagatgagatgatcattcagaaggttggtagggaggcattgaataagcaaacctgtaaacctgtttaaagccacaattgctcattaatatatagaagaatctccatttttgtttccagcccagcccccgtccttcaaaatatggtttatcccagaaggctttgctccagtctgctttctggggcagagtcttcatctgaaggtgtccgcagagcattgaatcacttggtttcagccctggtcatgtccaccccagctcctgaccacacagagccatgggcacagatgggagacccagccaacccaaagatgggaactctatcagggagtagaacctgtggtctgggctcattcacttgtcaagtgttcagggagacctactgtgtgggagactgaacaagacaatcccaagagcccacatcagtgaatgatgccaccaactaaaccagcaccttggctcgaagccctttaggctcgcatctgtctcatgagggacagatctagctgggcagatagcaatggcatcttagctgaggctaggagtggagacagcagggagtgaccaggctatgggtagagcaggtgagacctaagggtccggagagcaccaggacccagaggtggcctcatgtcttcacacactctgtaagtggcaggtgctgaaaaggataagcaaaggggctttggtgcctgccccctggggtttcattctgacaggagacagagatgggtgacatcggccaagtgaccgacccaacaaggacactgcagagtccatcgttaaggaagacatgagtctggagagtgggggtgggaatcagtgctgaagctggagacccaatgtgggtgtggctggggcatttaggagctgaaggcaggagcagaaagcagggtcagccaccctggagaagaatctagattttttttcctagaaggcagagggcaggagttggtggcctaggctaaggacagtgagaaggggtttgtgaaaaaggtaggggaatgagaaggtggggctgaggaagtgggggtgagaaggggggtgaggagaggtgggggtgaaaaggggggactgggtaggactttggagtgccgacaggacagggccaggcagagggtcggctgaaccctgatctgccccatgtatgtggatgctttcatcaatcagagaggatagcccacccagtgggacccagcagagatgtggagccggggccaggcccttcagctgactcagggtccccaggaagggttcagtcaaccatgttggggtgtccttgctttgccccaggacatcagcagggaaggactttccagaagctccaatgtcttctctgcttcctgtgattgctgccatgtcccttccaagggaccaaccgtttacttggccaagagcgatggctaattcttgggattgggacccctgggaagtctcctgtgctcaccctttgttcagctgtggagacttttgtcacagtcacccacatccctgtggcttccagaatagcccgctcctgacccagtagaagccatgggagggacaggaagggacctgcaagctctcccttcatgattcttgctgggcccctcactctttgggaaggtgtccttcccctcagggtggggctgagctggaacctagcagggctctgtcactgtgccttgcagagaatggagaagggggacgcaggcgagcagcagcgtctgaaacctaattgtgtgctgtctaatctatcaacagaggacagctcgccaagcccctcccggctgcctgataaatgccgttccaggccccctgtgtgccagggttgccttaattggtatcaggacgtgcctggactccgttgtccttcctgcctgctcactcctgctgcagtcactagcaagtcactggctgccacctccacctctaggacatacaacagtgtccacaggcccaagaggagctggagaccagcagagacttcaaccacccagtacacttactggagtgccaccctcttcctggaggaggcagttcagggaatccagcccaggaagacatggagagacactgaggacagatacagggttcatttccacatgcacagcctgggagggttaaagggtgatatctacccatttgggaaggttctgttaagatcacacaggacagaagggccaagagccaggtgaccctggaaacagccacaagactgactgatttgctcgcattgtccttctggttagaacaccaccacagcatgctcttcctagtgggtgggcctctccaaattctgaggagagtggagtatcagtaaggggcagaacaagggagcaactgggatgggcatttgtacctaccttccttccttccttccttccttccttccttccttccttccttccttccttccctcactcattcctccaggatttattgagcagctaggtgcttccctgagggtcctggcaggatcagtgacatgatttttagggacgtgtacaaaagagcaactggagtgttcctggtccaacacaggaccaaggatatccagatggccactgcacatactctcttcagcaatggacctggttctgcttgtcaagagccaccagtctgtggctgggggacctgaaatgacatcgaggccagagctgtcccaccctgagtcccaacttcttagctgccatcctaacttgtcatacaactgaaaaatcccatgttctgttaaatgtattcaaaagccagatccagccttggagaacaggaaatgaatgatattctgtctgccccttccgggtggtctgttcacggacacctccctggtacatagcaacataatgcagacatcaccttactcctcatttatgtatttgtttattactgttcttgggatagcctgtgtatctcatgctgccggcacattcgctatgtagctggggatgaccttgaactgatcgtcctgcctccacctccaaacaattagaggtgtgtgatattattggtttatatagtgctggggacagaaccagggcttcacacatgctacagaagccctccactaactgagctaaggccctagatttctgggggttttgtttgtctcctagttagggtttctatggctgagatgaagcatcatgaccgaaaagcaagctaggaaggaaaggcctcgtgtggcttacacatccacatcactgttcatcattgaagggagtcaggacaagaacctggaggcaggagctgatatggaagccacagagggatgctgcttagtccttgcgcttgctcagcctgttttcccatagaacccagaaccacccgctcagggatagcaacacccacgatggccggggccctctcccatcaatcactaattaagaaaatgccccacagacttgcttacagccaatcttgtagaggcgttttgtttgtttgtttgtttgtttgttttatttgtttgtttgtttgagaatagggtttctctgtgtagccctggctgtcctggaactcactttgtagaccaggctggcctcgaactcataaatccacctgcctctgcctcccaagtgctggaattaaagacactcaccacacattagagtcattttcttaattggaagttccctcctcnnnnnnnnnnnnnnnnnnnnnnnnnnnnnnnnnnnnnnnnnnnnnnnnnnnnnnnnnnnnnnnnnnnnnnnnnnnnnnnnnnnnnnnnnnnnnnnnnnnnnnnnnnnnnnnnnnnnnnnnnnnnnnnnnnnnnnnnnnnnnnnnnnnnnnnnnnnnnnnnnnnnnnnnnnnnnnnnnnnnnnnnnnnnnnnnnnnnnnnnnnnnnnnnnnnnnnnnnnnnnnnnnnnnnnnnnnnnnnnnnnnnnnnnnnnnnnnnnnnnnnnnnnnnnnnnccctccctgcctcccctccctcccttcctctttccctctcttccttctctttccagctctgctccccacccccaccccagtactggagctcaaatacaaacctcacagtagtgcttgctagatgaatttcaccacggggctgcacttgagctcccaggacccacggcctccagcggcttccatgaaaaagaggaaaagaagtggctgtgtgggtgacagaacctgtgatcattgttaaaaataagaacccagggctactgagatggctcaggcaataaaggcacttgctaccaagcctgcagaccagagttcagttcttgtatcccacacggtgcaagcagaaaaacaacttccaaaagttatttctaacctcctctcgtgtgacatggcacatacatgcccgtgcaccaaacacacacacacatacacgcactcgtgctcactaaattaacataagccttgctctaagacacccctacctcatgcctcagcgagcaggagcagcgacatccaggccaggcaagaagacagagaactcaccctggaccctacaccagttcctccaacagcagggagacagaggctccttccatcacaggcccatcgtggctcctctctccctgtccttccatcactcactgtccctggccccaggaaagcctgtgagccgcaggtctagtggccctgagacatcaggcgcccagctttctcctcaccagcacgctcaattaccagcttcccctagcttgcatgtcccctttgtgattaacgcccttctaaactcccttcccatcagcagccaccagcctgtgaccgcagagtggtctgactcttttaaaatgcaaacaccctcaaatacatgcacacacacacacacacacacacacacacacacgtgcacatgcacatacacgctgcagatgcagctcatccttccctggacattcagagatctggatggagctcccaggaggactgcctgatacgaaatgctggaaacttctggaagaaggtagccatcactctaaacggcagaccagagctttgcttgtggtctacaagctgcccagtttccaggcatgctggacaggcatctatctccagaaaaggaaggaatctgaggctcagagagggcaaactacttgctcaaggtcacccagcctagattttttgagcccaaacacttgggattcagcagggagatgccagaaacactaagagctgctgcctttacacagtgtcaacacaggctgggccaggagctagagccaagtgggcagatgaggtgggacagagcccagtgggtggtggtcggaatgccagccttggctgtccttgtaggtgctacagctgggcctcacctacgaagactgggtacccctctgctgatccccagcaaagagagggctgtaggacctctggtgtgacctccagatgcagcccagaaattctgcctttgcccttgcttggaaacactggagtccccaaggacaggtgaggcccaggtaaggaggtctgtttgagctccctgtcctgccaacgccccctgtccccatcccacccccacaccctgcagctcccttcctacccgcctgctgcactgtgcactcattagagcagagctgagcttgctctgggttaaaaatgctctgagcacagcctggctttctttcccagcttcagcaccaagtgtgactctccagcatccccagcctcctctcactgcggcaaagggaatgtcagggcttcctggacctctggcagacctctgagatggcctggacttccccatgggttcctacagttcctcatcatctactggatggttgggatcaatatgggagaggactgcccacaacatggacctgccaagctgcctgccttggggcaagtggatgtacttgacccgcccaccaaggtctggacagggggcccttccacaccccaggagctgagtgtgctgagcctcctggggagctgggactcactgttcctccctgagtgatgtgtcagctggtggtgtaggtaagagcagagcagagcagggccctccccacagggccagctggtgtcccagccacccatactcctccccacccccatcgcttacctgtctgcccagagcctagctgcccctactaactgcctggactggttacaacaatgcactgcaattgtttgtttgtctctttggagaaggatgttcagaaaaacagaatgcactagggctgcgcagggagatggctccgtcatgaacaaacgatgcctgcagcagagccttgtgacttgagttctatctatggagacccacatggtggaaggtgagaacccactcccccaagctgtcctcggccctccatgtgtgcaccatggctcacacgtaaatacacatgtgaacaaataatgaataaacttccatagtaataactacaaaatcggagcaaaatgcaaccaaaaaactcacagacattacaaattccaccatcaggggctggcaagatgacacattgggtagacagattgctgtgcaaacatgaggacctgagttcaatccctggtaccctgtaaaaagtcaggtgtgaagatgtgttcttgaaattcgagcatcaggagcatgaggcaggaggctccctgggtctcactggccggcctgcctggctgagccagtgaggtccagcttcagtggaagaagaccttgtctcaaaaatatagtgctgctggtggagcactcctttaacatcagcatttgggaggcagaggccgaggcagggggatctctgtgagttcaaggccagcctggcctatagagtaagttccaggcccatgaaagctatacaaagaaagcctttcttgaaaatcaaaacacaacggtagagatagatagatagatagatagatagatagatagatagatagatagatagatagataaacagagaaagattatatagagcaatagatagatagatagatagatagatagatagatatagagagaaacagaaaaattatatagagcaatagatagatagatagatagatagatagatagatagatagatagatagatagatatagagagaaacagagaaagattatatagagcaatcgaggaggacatggacatgtaacatcaagctctggtagcacactcatgtgcacacacacacacacctcacacacacgctcacacacaccccacaccgcacacaacaaaagcatcctgtcattagccaggcatggtggcttctatctttcatcccagaacttgagaggctgaagcaagagggcagagagttggagcttgataataatcatggctatgtagtgagctccttgctagcctgggctacatagcaagaccctgtttctacattaactagtaatcagttagttgccaacacccacatctcttctggaaaccaactgtgttatgaagatcctgaaatgtgaagcttgtatctaagaagattgctctctgcacaggaggggccggctcagccactcaccaaatgggctcaggggtacctgtcctggacactggcagttgaggtctggcagagaatttgggcctttccccccacctctaactgtcctagaacaggattggccttgaactcacagagatccacctgcctctgtctcccaaatgctgggattaaaggagtctaactaccactgcccaacatgatttatctatttatttttattttatgtgcattggtgttttggacgcatgtatgtctgtgtgagggtatcagatcccctggaactggagttacagatggttgtaagctaccatgtgggtgctgggaattaaacccaggtcctctggaagaaccattgagccatctgtccaacccctcaatttgagccttctaactcctcttccagtgtagtctgtaaggtccaggattctccctttggccctaagattggtgagtctcttaggcagatggtttaagcaaacaaggtttgcctgcgtgtgtacaggttgaggtttgacagcatcagtgcaaaaggctcagactcgtctggcttcctgttttatcagtcctagtgtctggcttttgtcctcacagtgttaagatggctgcctcacctctaccatcacatccacattctattcagaaacaaaaggaataatgacagttattttccatggaagttttacttttagattcaggaaggaaactcttctgcctctatcccattgcccagagctgggctaccttagctgcaagggatgctgagaggttacttgttaagcttgtccgggtcctagagtagaggaaggccagagacaggaggcttggaatgtgcatgtgtgaggccacacaggttaggtcaggcaaggctcagcagtgatgtcatggcagtagcctcccttgtccatcttcagacctcctgtgcacccctggctgtctgggactcgctcatcttcctctgctcagtgtgcagttgaatggaacttcaaactctcctgtgtcaccagggttcccagtactctgtcttgtctccaaggatgggtcctcagtcagcagtcccagagatagtccctgcctgctgtctgcaatgagaagccattgtttccccagtgtggggtaaccctcaaggaatcagggactctaagaacagcacgtaagttctaaccatctctgcttacatggcaggggagctgaatctgaccctggcatccaaagctcagaagttcaaggtcatcctcatctacaattgagttctgggccaacctcggttacatgagaccctgttatgaaaaataagaggggcgagagaggtggcaacgtagttaagagcactagctgctcttccagaggatctatcccgtttcattcccagcaccaacaatggcagctcacaaccacctgaaacctcagctctagggagtctgacaccttttggcctctgtggtatcaggcatgcaaaactgtgtgttacatacatgcgggaaaaacacctgcacatgtaaaatcaaataagaaaagaaaagaagaggagggggaggaggggaaggaggaggaggaagagaggattgaaggaagaaggtaaggtggaaactcattgcagtggtcaagtttttattgactcagcctagctacccagtccccagagtatctgtatccgtggcacaggatgagggagcacgcttccttacaaaatgcccctgctttgtgatcttgaaaatgtccctttcctccctccctgcattccagggctccatttctggaggctcccactgggcagagctggctctttggccccagcctggatcacctgagagagaaggcagcccattctcagtttggaatgactttactttaagactctggtgactcggccctggggatatgacccaacaggtaaagtgtctggtttgcaaacttgaggaccagagttcaaaacagctcacagccacccataactgcagctccaggcaatccaatggcctcttctgatttccatggcacgtacacacacacacaaataaataaataatatttaaataataataaagctagggggttgtggcacacgcctttaataccatcactcagaggcagaggcaggcagagctctgaggctaagacaagcctggactgcagagtgagttccaggacagccaggactacacagagaaacccccgactcaaaaaaccagaaccaaccaaccaaataaaagcaataataaaattgcaatatgtagtcaacttctgaggaaggacggcaagactgaactttggcctccaacatgcacatgtaaacaggacatctacacacaaataaaatgaaaaataaatagaaaagagtccccaagagctgtgctactatacataaagtgcggttctcatgggtcctgactggaatccgagtgtttatggggattttgcacatgcatgggctccatctccaacacacaaaacaaaatcgagtttctgggacatctctccctttggggtaaaatgaggtcaatcggagtcagactcggtccacatagggtgagtttgggcaagtggcctctgttttcacagcctcagtttccccttctgcaaaatggtgtgaagtggacatgactcagatcaataccgtattagctccctaaggctttcatggatgctgaggaggatccctgttatctgttgctatgctagtgtgggtgcagctagtgatgctaggatggtatgggtgtcttcagccagaggtcacccaggcagatgtgctctgagtgagccaagtgtcactcctggtgagatgggagtggccactgagcaggggaacctcctctacctggcacccagctgcaacaccaaggggcaacagcagagttttgatcagagtgttaatgggatggggacgggggctggggctggcatcactgatgcagtatctgggagctggggtggtgttgtctccatctgccctcccagagtcacctatcagcattgcatctgagggaaggtcaaggctctgctcaggcatccctggggtgggggggaggggtacacagctttggtgcccatgccatggtgagacacatcttgggcaagctcctggggttcagactaactcatacagagatggcctatctcctagcagctaggacttcctatttcagaggctaccaggagaacagagcctccttccaccaccaccaccaccaccaccaccaccaccacaccagtcacagaatcccagatgggaggaagaggctggggtagctggggtagctcagaatcactgggtggttccagcagtcagacatacagggagggaggctggggattgttgctatactgcagctgcctggacttggtcctccaaggtatccaaccaaccgtgagctcagagcctcttccagcttcctcttgccctcctcttctcccgccctcctctcctctcctctccctcaattctgcagcgttcttcagctttctcttagggttgagtatgcacaccccgctgtgcatacctgcaggtgccttgggtacacatgtgctcgtgttttgtgtgtgcacccctgcatgcatgtggattggtgtgcatgcacgcatggtgcttctgcgtgcaaatgtgcgtgtgttctctgtgtgcacatgcagatggaccagtgtgcatgcatgcatgcatacagtcatgcacggtgccttgtgtgcacacatgcatgccttttctgtgcacacaagcctcgtgcctgtactcccgtgtgcatccgtgcaggtgtgtgcatgctagcgcccgtgtgagtgagtgagtgcccgcgggcgcgcgtgcaggccgggcagggatttgaagcggcgtgagcgccgctgataaacagcccggagcggcgcgctggcggctgctatcggagctgctggcaggcgcgcaagaagctgtcccggccgccagcgctatcagcccacggagggagggcggcaggagggcgggagggagggaaagtgtttgcttcagcccttaatcacggaatttgaaatcccagcgagtcggtgccatttattttcagagcctgtcaaggctggtttcggcgtttagaagaaaggaggctgtgcgcatttacatctccggctcccaccgccctcctggatccggtggggagaggccagcggtcggctcctgggacttccccctccacggtcagggctctgggtggcagatgggcctgctgagtgcagggtgctggcgggggcatcacattttatcccataaagcaaccctgatctccccacccaaaatttgccccggttccgggggactccggagacttctgccaacctcttacccccctcaagcctaaggggggctgagggcaccgcaggacaagccccttcctgtgcagatatggacactgagccctgagactgagttctggagatctgttaggccaaggtcacacaatggcagaccgagaccaggagggaggctggggatgagggtacacagggaatggagagggagctgtcaggctgaaagctctcttgctcagtgactttacccactgtcccttctctgaccttgatgtggaaagttagggacctcccaggggagtgagtttgccaaggctgggcaaccagctctgcctggtggctggggatatcaaccctgcatctaatctaatcagccccactcttttccccctacctctagtctccgtggcttcttggggcttctgtctccaaggagactctttgattgaaacacagacccccaggaaaagatggcagtgtctactccccaaggccccgatggaatgaggacttcctaggaccggcagagttcaggcatgcgcagtgcctggcagagaaaaatacctatgatacccctctttccttactgatacagcccctcagtcttgctcttccttcccaggacaggaagtgactctcaggggcttctcagtcataatttaggcgagtcatggccaagcccctggaaaggtcccatgccgggaaagatggggaacagcagagaggaggaagagtgagtgaggttggagttttcctgtccctctgaacacttaaaaagccttatgtagccgggcggtggtggcacacgcccctttaatcccagcatttgggaggcagaggtaggcggatttctgagttcaaggccagcctgatctacaaagtgagttccatgacagccaggactacacagagaaaccctgtctcgaaaaaacaaaaaacaaaaaacaacaacaaaaaaagtcttatgtataggagaatcagctatcactatgggttctatgtgacagtttattacaccttattatttatagttacataatattccattggtgatgcatatctgcatgtggtatctgatccctagtagattgtgcccaacttgtcttctaccttccaagcctcagagcacccagtagtctcctccaggaggggccgttagagctgtcgaaggcctctgcaggcacaagggaagggcaagtagctctgggacacttcatcccctttcataagcaagaggtaggctaggatttccctagagccagaacagaatgagagaaatggcttcaagtaagccagcatagcaggaagctagccttcaagtccacctaggtaaggaaggccctccaattcatagtaacctgcaggcagagctacccagggcggatcacaaagtctgaagagggtagagtatgactgagaagaaaatgtagcaagggccctccaggcaccctctctccctttccctgtgaacctgggccacctcagtctactccctaaggccccggtttggattgaggatttcctgagacctccagtgtttgggcatgcccagtccctggcagagcaaaacaccccaaatggccctctttccttaccaatttggccctatgccctttgccctgcttttcttttacagggcaggaagtgtccctcagggtcttgggcccatagaggaagtaggcaggaagccccaagctttaagttcctgctttacttgggagccagctccttgtagcttcagtttgccagtctatatatgtggatattggcagcacctaccacactaggcaggagttctgaggactcacaaggaatccaagcaaagcctacagcaggctctccaacacactgctaagtcccagggagcctcctcagtaaagagactgtggtacatgtgtgttcctctgtgtgcttgtgtgaacatttgtagttatatatgagtgtccatgtgtatgcacacctgctcgtatagtcatgtgcacatgtgtgtacataaatgtatgtgcatatgcatgtgtatactctatttgagtgtggcatccacacttgtagtagttgcttttcttttgctgtgataaaatactataatcgaaggcagcttaaggaagagtttgttttagcttctggttccaaagaggtagataaccacaatgtctaggaaggcatgatggtaagagcaggaagtagagagatcacatctcagttgcacacaggaagtattgggagtaaaggggaactataaactctgaagccatgcccccagtgatacatttcctccagtaagtttctactcctaaagattccttaagttccccaaacagcatcaccaacaagaggacaagtgttcaaatacatgaggctacaaggaacatttctcatttaaaccaccacataactctgtgtgtctgtcctctgcccccagaggacactgtgatttttcagcatacctatcaatacatctttctaacttctctgggccttagttaccttgtaagataagaatgacaaagttataatgctaaacatattaggcaaacagcacacacacacaagaatgagctcaggagtagctggtgtgtgctcatgtaacaaaatggaacataaccagaggcaggagcatgctggtgcatgatggaggctttaaaagctcagcacaatttgacaccagctgggtcttttctctgaggaatatggtctatgaaggactgactggattcctaaaaagagactatgtgtgtggagcagaccaatgaccaaagtacagatagtactaaatctgaggtgttaacagactttgatcataggaatctactcttagttaggagggggtttgttatgtggcataacatagcataagctgaccaatgcagaaactggaatttagaaatagtaggccactacaacaagtatgtgtcatgggttctaggggacaagcaatagacgacaaggagacaggtactgaaggcctgaaacttggtttggtagcctgttacacaggttacagtttctgtaaaactcctggctatgagagttcaaagctgaggttggagatatgactcaagttgagagcattggctactcctccagaggactctggttcaattctcaacaccctgacagcttacacttgtctgtaactccaggtctgggacttcttacacactcacacaaaggccatacaccaatgaacattacattaaaagtgtgtgtgtgtgtgtgtgtgtgtgtgtgtgtgtgtgtgtatttcaaagctgaaaaacaaaacaaaaccaaaacaaacaaacaaacaaaccagggtatgatggtgcatgtttgtcatcctagcactgggaaggtggaaacaggaagaacaaaagttcaaggtcttctctgactacataattcaaggctagcctgggctaaatgagatcttttctctcaaacaaaacaaaacagggctggacatgtggctcagttgataaagtacttgtctagcatgcttgaaggcctgggttcagttcccagtaccacggaaactagagtggtggaggacactattatctcaacacttgagagatgcgcaagagggtctggtagacaccctgagacaatcaacaaattcccaactgccttaggctacttgagacagcatctttgaaggaagggagggaggagggaggcaaggagacagggaagaaggagagcctgcaaaactgatggtcctctgtggctttagcattagagatggaggaaaaggaatgctgacacatctggtcacagatgtgctggcctttgatcttaagccccccccccccacacacacacacacactgggaagtaagtgttcctgtgaggctgggctggaggtgggagggctggcttttatttagcagctatccaaggattaggctgcaggaccctgggggaaagggagggagaatgggcttctaaggaggaagcctgattgcaagccaaagagatgcagaaattttaggttttcggggttgaaagtacagttagtgttcataactgaccaatgaaaggagaccagggatgcagctcagtggactgagcccttgccagcacgtagaatgccccgggttccttcctcgatgctgagcaaacaggacatggaagcagtggtcctggcctgtcaagcctgcactggggatggacatgaaggtagaggatatcaggagttcaaattcatcctcatctacacagggttcaaggtcaccctgcactaaatgaaatcccagcagccagtgtccagaggcccaagcatggggggggggggtgcgttcagagagacctccagctgggagcggctggggcaggtcccacctgccactctgacagctcactggcccacaccagggccaggcctggagttgggccatcttctgacaaatagacagacacagttctggcccctctggcagtgaactgtgtctacaaaattcaagtgacaaatgacattttagtaagactcctgacatatctgtgcttagaacacatgacatgatcttggagcagataagggttttaattttaacttcatctgtgtcccctgaattgcattgttggagaagcccacccgtgaattttaaactatacatagagactcttcaaagccacccatggatagtcaataaagattattctagactaaagaaaaacaacagggcaaaggcatgctcagccagcatagcaggcttttcagtcagtttggtcagcactctctcttgagtaaatgtcatggttagtgtggtcggtcatcacaccccttgttgaggctgcagggtctaggtgtcacctgcctgtcatcccaggccaggaaagaggatcccccgtgaggatagcctggactaaagaatgagaccatgaaacaccaaggactggaacagagctcagtacagtgtccttctgccctgggttcctctctagcactgcaaaccttatcaatacggttagctccaagtggaaactctgagctaagggtgtgcatgacacagccaccaaatcctctgttcacaaccagctcctggccagcccaaatcaaaggggaggagccccgtgaatggattgggaggggagggggagatgaggtgttgctattggcaaccaagatggcagatggcaagtagggtggtcattgttcctatctattgtaaaaagaattatccaggcctgtcctatctccatgtggcaggctgagccccgcccccagtcaccccaacaccacagccttaagatgtgctttagccagtgaacataccctggagtcagtcaactgaagaacagcttcaagagtctgtgtgtggggagggcagtccactctgcttttgctcagagcggggagcctaaacagggagggacagcatccaagcctcttaatgggtgtttttacacccttgctccattctctagcattcagaaacctccagtccatccctctgttctgcaaggaacacctggcaagctaggtgttgtccattcttccttatggtcagggaaacttgggggttaccatgagccacctgttgggtacaggtgtcaagccgcctgcctagtataggtggggttggggttttctgcagatgagcaagttatccgtaaaattcctgatacctggggacactgtggctctcatcaaggctgtgtgacttgtccaagatcctcttagctattaagtggatgagtcaggacttgaacccaaagatgccttatggccaaaccactgggctcccatgcccctcacaccacagacgcacgacaggtattcgtaagctgatgcatgaggtgtcctgccaaccttaggaaagccactaagttctgggtgtagtcacagaggccccagtctctgggttgcactaatctaaaaactgagggggtaggaggactcaccccatccatccctgtctccccagatcaccaggagaactcagtttgtcacagtgttgatcatgtgatggataaggctagagacatggctcagtaggtgaaataccccttgtgtaagcatagggtgatggattcagatccccagcagccaggtgaaaagacaggtgtggtggagcactgagatcccagcacttgggagtagcagacagtgtggtggagcactgagatcccagcactagggagacagatgctagagaagaggatctttagggccaactggcagccagtctagccaattagtaagatctagcttcagtgagagaccatgtctcaaaaaataaggtggtggggctggagagatggctcagcagttaagagcatttgctgttctcacagtgaacctgggtttggttcccagcacccacgtggctacacaaccatctgaaactccagttcctgtgcatctgacattcgtgggcactccgcacacgtggtacaaaatgtggcaagcaactaggaagacagccaatatcaacctctggtctccacgcacatgagcatacatatgtgcccacactggcacacacatgagaacaaaaacatgcacacacatgcccacccaaacgcacatatatacacataggagatggcaatatgtggtcatttcctttagaatgtgtcattttaccaggttgggaagaggagggcagaagagccattgctgttcccattttgttaaaggggaaactgaggcaccaagtaggcaaagtctacctctcaacatggtttctggctgggggctcagtagcttgcctaatatataggaggtcctgaattccacttctgcacaataaagaataaataaaaaattacatttattagaattataaaataacattttatgatttccaggggtgagatgtgggggaaagtcatgcagtttgaaccactctctcatgcagtctacactgggttggggctcactctataccagagtgtgccacactcctggcttcaggactgtcacagttgcaggtaggcagagacatacctctaggccttttccattttaatattatcacatcaacaaacagttcacagagcgactctagcccctggcccaggatttgggacatgcagccttcactgtggcctacatatcatgtcgtccaggagtcagggggttggagtggtggttgaccatggatttctataacaccaccaagtactgtgaaaactgaaacccaattggtgactcattcctataatgccagcacattgaagcgggggtcatcttcaactctatggagaatctgaggcggattgagctgcataagactgtgttcccatccaccaagcgccccacctccccgagagagcacaggctgccttgcagtgggcatgggctactttgatggaatatgtgcacatcagatatgtgcaccagggaaggaccctggtgatcagaggcatcagtcaacatccatctctttgctcccctactggagtgggaaggggaaggtggctttcttttcctgatctgtggcctgtccctctccatcatgaagccaggcatagctcccagtctgaaagagtcacaagtgagttctgcccctgacagcctttgggtgggtgggtgggtctttgtgcctctgtccagcagacctgggctacagcacagcctggggttccccagaggacagaggcagcttgcttaccatgttccacacacgcagcacagtttggcctgccttctcccccggcaacgcctggcccttggggcagagcacagaagctgtagtccctaccagctcactcctgcccatttccagttcctgcatcctctccagggctgctgcagctctctgctcaaggtcaaggaacaaacagataaaccctgtccttggagccagtggagagagagcctccagctccaatccaattgagtcagggccagggagtacggttctgagaatgtggcgacaggaaggagagttttgcggccatgaaataagcgaaaatgttttgtaggcagaaaaagaggccaaacagtcagctctggtttaaggcacaaataccgaatgcaagtagctagatctgagcagggacggtctgggggtgggaaactaggatattcttgtagctgtagtgatatttctacccctggggacctgacgttagacagggtgtagagagtttaggattgagaccaggctcatgaggcctaagtagagtcaaggggaggaatgagcagagagttgaagactccagaattttctgggcttttggccaagatagcccagcagttccgctgggactatggttttgtggacttactatggagatggacttgatgggtcctttcttataggagccaggagatgtcaaccattggccagcttgggaggggtcacataggacaggatgggatgtgtgtgaccctatccagagggcaatgagaagcccatctgtctacgttgtacttcagagggactccttcagacagcggtgtggagttcaggctcagagactggggaagggcagaggaagatctccagaggctggacagggagcaggagtgggcagatcaaagtgtggtagaggcagagccacagacacaggcgacactggacaggaggagctgtctaagagaggggacaaagacaatgcccaagactcttagggagacaaagggagagattgtgtaggtgtgctggagatattctctctctctctctctctctctctctctctctctcctctttgagccttaggtaatttggtcaggacacctggaagaaggtacagctttggtccccaaaagcccaactccatacaaatcaaaacctgcacagggacctgcacagggacacatacacgtgctcgagcgcggaggggagtgcatgcaagcacttaagggtacagggggagtgtgtgagtgtgtgtgtgtgtgtgtgtgtgtgtgtgcgcgtgcgtgtgtatgtgtatgtatgtgtgtgtatatgtgtgtgtgtgtaagtcctgaaagaacagaatggtgcctttttggagggtgggtggcaggcatctgaagactggcccttggcttctgtagtgttccagggcattcatgctggcctctgagagcacccaccctctcacactgactgaggcgcctcctagcttcactgacccccacactggggtgggctggctttcctcctttgaaagatactctttggctggtcctgtgggaagtaggtggggtctgtggtagaggaatagctaggctctgtggacaagtgtgctatggtagaggagacaatggatacagggacattgtttggcgcagcaggtagaaggtagccacggaggagtggctggatatgggcagcgtatggtgcaggagggggaggggaggaggggcggtgggcagattttgaaaaagaagggacaaggacagggtgacccaaggcactgggaaatttgttgggatccagtcctgtgttgacccttccctctggcttctcagttcccctagagcccctccctacttctagggagcccggctctggatacatctgcacctgcaccagggcttccgcccctatgtctggaaccgaactcttcacccaggggtttgggtttggctgaggcctggttatgtcagaacccgtgcctggggaggaagtaggaagtttaggtgtcctccacacacaccctccgctcacgtccttcctggcggtgtgctgcctccccactcctttcttccccatccttcctcccttttcctcctcctccctcctccttggctctgtccccttctcaaagagcacccagatgggctgggccggtcggcaggtatagcctcagccaagtcctgccctaactctgcgcccttggccctgtcaggcccaggcattcgggaccccgccgcctggtgcccgcccctccccgcagctccgattttcagcttgggtttgatcggctgccaggatctcccaaatgtcagcagcagcattcgcgtctttaagagagcgcccgaggcgatctttaagcggggaggctggggccggcgctgacgagggaacgctgctgacagccacgctcgtgcctccccagccagcttgcagagctgcagccccgctctgggcctgggctcattttgaagcctgggataaaaccaggctaggccaggagttgagtagcaggacccctgctggaagccaagagggccaggcatccatagattaaatacagaagttttaagagctgcccaaggggcagagaagggcagttcctccttcctcaccttgaagggacatattcagggtgaggagacaaggggaaagccccaaactttggcttagctgttgttcagagctgtagtgagagctgtgtggccttgggaaagttgctggccctctctgaacttcagctctctcatcagagagggtgctcagggggccagaacactggtatagaattgctggggcatcagggtcacaaagagaggaacaacctaatggggcatgtggtgggtaccccaagaaaccccccccccttctcctgcctgctcctacaggatttcctgcagctccctctctctttctctctttctttctctctctctctctctctttctctctctctttctttcgttctaagatttatttctttgtttcatgcatgtgggtataccatcgctgccttcacacacaccagaaggcggcatcagatctcattacagatggttgtgggccaccatgtgggttgctgggaattgaactcaagacttctggaagagcagatagtgctcttaactgctgagccatcgctgcagccctcctgcagctttctaagcagttttctgatagaggctgccatctctccctttcatccttaggtcatggatggtcctgactacccaacttctcaagcatccaatgtcctcagagaaagggagaccagaggtcagttcccatccaggggagatgtgctgggaaagtggcagcgtggacttcctgtccctgagatgcagcctttctgggaccaggcagagtggccacgaaactgagagaaggtggtgttgtccagcagggcccaggattggcatctcactcatcaaagcatgttccaaactacgggaacaaggctcagaatggctgtgaaataaaatcagaatgtgtggatgaagggtgggtggaaacataagtggacaggtaaaaggtgggagaggatggctgggtgagtggcgagtgggtggacacctgggtagatggatggggactggatggatggatgggtgggcagataggaaggtagatggtaggtgggtgggtgtgtctggagatagtgaattgaggtcttgaggaggtgggtaaatggctggttggacgactggatgctgaggtgaatgcctaggtgggaactgggtaaatgagagcagagaaggtgggaagaaagatggaaggaggaatctgtacatgggggtgaccctgatcgccagtgaagaccacactcagaaaatggtagctttgtttgtcatgatgggacctggaagaggtcatctgggtctcagcttcctggtgtgtctacaaagggcaatagcatgtggacacatgtagtctcccctcccccagcctgaaacctgcttgctcaggggtggagcttcccgatcaatcgttctgccacgcccactgctggaacctgctgctttgctgcttggagccatactcgtggtcaccctgctactggactctgagattatttggtgggaatcgggccccttcccctgcttcataactgcgtgcagaacagtaaatttgagctttgatcagaatgcctgtcttagctgcatctctttctctcgttgcctagcccttcttnnnnnnnnnnnnnnnnnnnnctctcgttgcctagcccttcttctcttccaggtttccaaaatgcctttccaggctagaacccaggctgtgatctgctggccggacacaacagacacacacattatacatacacacacatactacacacacacacacacacacacacacacacacacacacatactatacatacacatactacacatacacactatacacacatactacacacacacacacacatactacacatacacactatacacacatactacacatacacactatacacacatactatacacactacacaccacatatatcccacacatacctccacacacaaactatacacacaccacacacactacaatacacccttcacacacaccacatacattccacactacgcacacactacacaccacacacatatacactatactcacacatatcacacacacacacacacaactacctaccacatatatcccacacatgcccccacacacaaactagacacacaccacacatatatacacactacacacatgcccacacaccacacacatattacataccacatacatcccatgcatatcccacacacacaaactacacaccacacatacactacacacacctacactacacatacacacaccctacaaccacatccttcccacacatacccccactcacaaactagatacacagtacacatacaccccttacacgtacatataccacatacattccacacatacacaaactgtacacacacaccacacatgtacacactacaccacacacacacacacacacacacacagagttctgaccctcaggaacccctgactgaggccgaggagatggctcagttggtaagggccctgttgttaataagtagactgacttgagtttggaaccctagagtcacattttaaaaagctgtgtgtggccacacacagtccccaactgtggcagggagggaggcaggtccatccctgggctctgtcggtcagtctggccaactggtgagcactgggttcagtgaaagatctggtctcaaaactaaggtggaggacaagagaaggtgtcccctccctccacactcttgtgcatgcacgtgtgcgtgtgtgtgtgtgtgtgtgcgtgcgcgtgtgtgtgtgtcctcacgcgcacacacacagcccctgtgtgtcctcatcaccatgacctggcaacaccacgccctccaagccccaccctgctgcatcctgtcctgtgattagcttcctctttcctgtgcccacaaggccctgctgtacagttcctggaaacatttcctgggaattgtgctcacagcacaatccagcagagaacacccacgtgtgggaatagcctggttcattcaggctggagctaggaggctgtctctaaagtcaaaagtggattaagggactggagaaggactcatccccaccgggctgatcatccctaccgggctcagggcttgcctagcacgcatgaagccctgagctgggtctccagacttggataaactggttgggtggcacaggcctcagtcctatcactctgggaagtagaagaaggagagagaagttcaaaggcgtccttagctagccgccatcgagagggaggctagcctgggaatccccttctcaacaggggaggggagggagggagatgatttagggggcaagtgcttgccatgcagggccaaggcatgaggattttgaacccccagagcccacacagtagtagcgcatctataatctcagtattctttagagagatgggaagtggcgaggagcccaggaggttcaaggactgaccagcctgggcattcgctgcagggagcaagaccccgtctcaaaacacgtggaaggtgagctggctagtgtgttgtgtttcgttttgtttttagagacagggtttctctgtgtagccctggctgtcctggaattcactctatagaccaggctggcctcgaaatcagaaatccgcctgcctctgcctcctgagtactgggattaaaggcgtgtgccaccacagccctggctagttttatgtcaacttgacactctggcagcaagccagaagagaatttccttatttggtgattgatgtgggcgggctgggcacatgtgtgggtggagccaaccctgggctggtggtcctgggtttcctaagagagcaagccacgcccagcaagccagtaagcagcactccttcaaggcttctgcttcagctcctgccctgggtgcctgccctgtttgagtttctgtcctgacttccttccaggacaaactaaggacgtggaagcagaagtcacggacgtggaaccctttccccctcaacttggttttcatccgtagtgtttcatcagtcccagccggaaggcaaggaccaacccctgaggttgttctgactgctgcacacatacaaggggagtacacaagaccatgagcactggacccccaagaaaaccaaagtgggttccaggcccatcctggccttctggggactgcagtgcagaccctggtgccatccggttagacctcagaagttgaggccagaactttggaagatgttgcagttgcttgaaggcaggagagggactggaggcccttatgaggcagagcaagaggtgaaacacagttgtctggtggtgctgtagctcagggtgcaaggccctgggtctacccctagacataaaggaaacaatcaagaaaaactccaccccatcaggcaggctctgggggtgcctgccttctcctagtctttgatcctgacctattttgagcaccccagaagttctactcagatggtgggtctcctgctgcttgctggagacctcttccctcaggaagctgccacaagggtgattgagctgtcagtacaaatgacaggctattaggtctggagccattttgatctgaggttggccagggtgttcctgtgttcctgtacatagtggggactgggggattctggggttgagggctttctcttgttcctcaactgtctccgactctggttagaaaggcacctccgccatctgtcatccctcccccactcccttctccgaggcccggctgtgactgggggctggcgtgtctggtaaacaggcggctggcaggtccccagggcctgtgggtgacaggcctggtgctggcaccaaccccagggcagcatgccgaggaggagtggagatgagttctggggaccagggaagatttcctgccatgtctgagagagtcgtggctgtgtcctgtccctggctctccagacctccgtggccgctatgactgtccaccccttctccaacgcttcagccccagccttcacatcttccctccagctgccttcagagaattcaagtcaatatctggtgtgaaaggctgtcgggttctctctacctgggtgaggctaggcagccagctctgtgccctggggagccacactccaccaccagagaaactgaggccagagggcaggtggaagtggggtgctgagagctcttaggactccacccccaacccttcggtcagctccctgcagtgaggggccgggtgccttcgcctcggttgtcttatctggggaatgggagggaggtcaggtctgtaggaaaggggtcctgccagtctttctcagctccctcacctcccctgggggaggatgaggaggggcaggaatctgtccaggtcggttcccggctccccctcctccaacacggcgctgccagttccctcccctcctctctcctgccttctggctgccagcccctccccacacggccccagaccccagctgcggtgtctttacagctctgaccagccgctcagcctctccgactcctccctccctccttgcttgcctccctnnnnnnnnnnnnnnnnnnnnnnnnnnnnnnnnnnnnnnnnnnnnnnnnnnnnnnnnnnnnnnnnnnnnnnnnnnnnnnnnnnnnnnnnnnnnnnnnnnnnnnnnnnnnnnnnnnnnnnnnnnnnnnnnnnnnnnnnnnnnnnnnnnnnnnnnnnnnnnnnnnnnnnnnnnnnnnnnnnnnnnnnnnnnnnnnnnnnnnnnnnnnnnnnnnnnnnnnnnnnnnnnnnnnnnnnnnnnnnnnnnnnnnnnnnnnnnnnnnnnnnnnnnnnntccaactaccctcctcccctccctccctctttctctctttctctccctccctccctccctctctctctctctcccggggaagaaaggtcacggtgcagctgattactcagagctcagttgctgtagcaaccggcgggggaagtgggacaggctggctttgaggacgcgcgaggtcggccgcgggcggctggagccggcgcgggccccggtgcgcgggaggccgcctgcagcccggttctgcgcgctgcggcccggctccgggttgcggttttaatgaggagcccgcgcccctcccgggactgctaggagagagtttctgctcctagtctcggttcccccggctcggtgtaggtatccgccctccgcctgggttctgccagcgcctcctttcttctctcccagccgcgtgagagcagctgcctccccctgcgtgcgcccacccaccccacaccagctttagccaggtgtccaaggagaccccaacaccctgtccatccccctcagcctttgttattaccagggagacccagcaggagacaggtgcacaggggctggcttaaagacccaccgtgagcgagcctgaacctctctctaagccctgagagcctagaagactcggctggattgctggagaaagccagacccctgctgtccttggctcctctccagctagcagccagatgagcaaggttagaagagactgggttagcaggggtccagccttgacaggaagggaagaggatccaatccccagcctgtcacctccacctccaccacatacacacacacacacacacacacacacacagcctggggaagtgaccaggccactttaggaaccggttgacatctttttcaaatgttaaactatggctgggaggtgtattgtcagaggtagagcatttgcctagaattagagggagccctgggttcaaatccagcatcacacctaaaaattagaatacacagttatttaccccaatcattccactcctaggtaagtgtgtcagagataggaaaaccaatgtccgtacaaagaagggtcatggatgctcagggcgccactattgatacaacacaaatcccggaagcagcccaaggtgtgcccaccactccagaagctgcggagcatgagagagcatagcctgcttgctcagatttctccaacactctagaaaatgctacctgatctatgaaagcagagtgcagttctgagggtgctgggggcctgagaaggactacagaggggctcgggaatcccactgggccaggctgattgcttcctgggtgaacaaaggaaaatagaggttccagccgcacaggtccctacttgtacagtcacacagggaagagaggccctagcacgtgcaaaggtccagtggccagggtgggatcagtgaggggaacattgcaggatatcctgtggcccctgtatgactctagcacccttgagtatggtttgcctgagtttgtgctaccctgctctcagggatgctgcttgctggtcctgggcctccgagtcttacctggtaaatgtgtgcatttaattctggttcttcagttcgattccactgatcaacctgtctgtttttatgccagtactatactgggttttgtttttgctttttttttttttaactatttacttttttattttatgtacattggtgccctgcccactgtgtgtgtgtgtgtgtgtgtgtgtgtgtgtgtgtgtgtgtgtgtgtaatcccctgcaactggagttacagacagttatgatctatcccatgggtgctaggaatcgaaccctggtcctttggaagagcagcctgttggggcctatcagaactcactgaaggaaacctaggatgcccccccccccccagtcctcagttagaacccatctgcctttggattttgagactctgggtacctttgcccagctgcctggggttcagggaagcagcctccttggcctcactccaagcctgagaacctggcacagtccaggtggccagagctatctagcagggccaccccaagagggagaaacagagcactgaggctggcaggttgagtccagggagtcttcagtggatggtggtctggccttccagcctaagccaccaacccagttcaaagcaagcagggggccatttcttcctttcctgagctgggactggctcttctgctggtgctgctgtcctctgccaggccagaggggttcccaccctctgctcactgggtgcatgactgacagtgagggaggtatccatcagacctcacttgttctgcacagagccttcaaggaggatgcacagacattacctcaagggaggggctgtgtcagtccccacctccggtcacagacaaggaatgagacaaatacagagcctcccctggggctgggccagcctgagaaccccttactatgctttctttgcctctgggctcacacagcattcaggtttgtagcaattagaagcaagagctacacagagagacccaccagtggctgtctagctagagagctctggccattctgcccttaatgcccttccaagtgcccttccaaagcagggcactgctgtaggaggagagccagggcagcccagggcctgggaggagactgctgagccagcctatcggggcaggtgtcaagagaggctggagaggtctaacctgaggctccaagctgaaggtgccctggtgccctggagacagagacgggaggcatatgcaagagtcccggctgggccgacagcagagaaaaaccagacccttgaaaggggggtgtttcagaagtggagagtcctgggaggcgaaagtcggtgagggctggacacactaggcttgtagacattttcagtgtcctactgagagtccatggaaggctttaggcaggggagtggcacgtttagaagcactttccagaaacatctctctggctggcgtgagtgaaagtgactgcaggggcaaaggtggaagcagccatattatcaagggggcctctacagatgggggctggaacggcttggcaaccggcagggtgaactaactgacagaaaagattcagaccagggattgactggcacgtgtgtgggaaggggaagagggcagtaaggatggtgggcttcacactggattgggggggggtcagagataaagtctctgcatccctctcttccaagtgctgttgcatatcctcacatactgccttgtccccagggctggtgctctctgactccatcatagcacacgtctgaagcatgtacactgtggcatgtatgtgcaagcagtgcagcctcccagccactgcaggctgtgtgtgtatgtatgtgtgtgcaggctgtgtgtgtatgtatgtgtgtgcacatacgtttaacatggagtatgtgtgggcagtgccgtggcatgcatgtaccatgtttgtgtgcacatgtgtgtgtatatgtttgtatacatgtgtgcatgtgtagatgtttgtgtgtacatgagtatgtgtgcatgtttgtgtgcacatgtgtatgtgtgcatgtttgtatgcgtgtgtgcatgtgtagatgtttgtgtgtaaatgagtatgtgtgcatgtttgtgtgtacatgtgtatgtgtgcatgtgtgtatatgtgtatgtgtacatgtttgtgtacatgtgtgcatgtgtgcatgtttgtatacatgtgtgtatgtgtacatgtttgtgtgtactgtgtatgtgtacatgtttgtgtgcatgtgtgtatgtgtacatgtctgtgtgtacatgtgtatgtgtacatgtttgtgtgcatgtgtttgtacagaagcactgtgaaccagcaggttccagaaggcaccagaatctttgtttgtgaggtttccagatctcccctgtatttgtgaggtttccagatctctgtgtttcccagaagctgatgccgaggcctaaactctctgcccacaaagtggggctttacaaagctacagtgcacactggataagcaaaggacatggctgccactaccacaccagaggagcaagacaagcattaagctaatcagatgtctcccctgggagtctgtgtgtgaagcagacctagagatggtcttgggattcataaggatgtcaggcagtttgaaaatgactgacagaagctgctgatgctgtggtaccaacaaggagcacacctgtgttggtttccatggtaaaggtggcagaatgggagtatggtcaagaggttctaggggtgttgcttcatcgtgtccccagggttaagtgttagaatcccagtcccactagctgagaagcagggtctttcagacagggcagagttgtggatactgtgcccttagaacagattagctctgggccagcaagatggctcagtcagttaaggcaattactgctgagacagaaccaacgtctgaaagctgtcctctgacctgaacacacaagccatgatacactgtgtggctacacacacacacacacacacacagagagagagagagagagagagagagagagagatcctctgctgcccaagggtctgctatgcaggcctgccccttcttcatgctcttccatgaagcactttccatcgagctctaccgcagcctttcccagcattcacctacctctcacatcataggggaagttggatttagcccagaccttgtaggggttaaagtcaccccacggccatggtcaccagtgatccacagaatcacaggagctggtggcaccaggatgggaggaaatgcagcaggggtagggcctggctgccaggtcacagcagggtctggcagggccccttcccaggaaggataagagataagaaatggcctggtggacaggaggccagatgagtcacagatctctggctgcagagggtctctgccatttccctccatacagaggatggccatggtggtatctgcttagcccaggacttagtcctgcctgcctccaccagcatacagctggcaccaagaatgtgcagaaaatatttggtggctcatcctgggcatgaatgaatgtgtgagttaatcaatgggtgaatggaaagttttaaatttcatctcatgtagtatgtatgtatgtatgtaagtaagtatgtatgtatacacaacaagtgaaggtcagaagacagcttgcaggacttggttccagcctcccaccatgtgggtcctcaggatagaactcaggttgtcaggcttggcagcaagcacctttacctgctgagccatctcactggcccaggaaaaacttctgtcatctcttcccacccttaagtcagctaggccggaggattttgacattgggttgtagaagcagccccagtgtcgcttcagggtggccagtaatacaggatatcagggtctactccatgctctgaaatcttattgtctcctgtgaggtgctgttaatgccagtttctcaggggaggaagcagaagccggagaacacagtgtcactctggtggcccagccagtgacccacagaggtgggattctcactcccatacataagccttacttaagcacacattcctagactgatggcagagttcattcattcacctgccaatcactcattcactcactcattcattcatcacccagcatcgaccaggaatcctcagggtgctatgccccaggcctgggcattgtgtctgcagcaatgaaggaaaggtttggcattcctgtctgtcagcatgccactcagacatgactggcagcaaaatactggggtgcagaaggccatgggaacctggtggcttcagggcactggcagactaatgtgcaccctgctggctggaagggt

SEQ ID NO: 886 - DNA, 1248 bp, Mus musculus
ggacacaattctaagaggagatgttggcagagctggcgtcttctaagccctctgtccttggcagatcgatatcttcttccagcattcccctgccatgtcattcatatggccaactcatctgctccagattctgtagcatgcccaaggtgaaacaaactagataaaacctgtactccggacaatggaagctccctcatcttgcgccacacaaaatagccactccccaccgtctggtgatgtctggaatctgtgtgaagtctcacaagagataggaaatctaatctaggaaggaattacaggcacctgccacagaacaactcaggggtaagaatgtgcttccggcacggtttggtcaagaagctcacagctgtggagcactgcctgggcttctcgtccattccttcctctctcccctcctcacagtgttggctgggtgtgcccacttggagctgcgatggctgctgagtcccaacactccacttcttcaccaccctggaggagcctgaagcagctttggagctctgaggtagacaagcacaccttctcagaggtgcttggacatcctatgcaggaagctctgaggagtcttccagcccgaggctactgtctacctttcctccaagattgaaacatttcatcttgcagagaaggggcttacgcgaatggtcaactcagaatggcttcaggaagtccacgaccctaaccaggttcttgtagctccttcttgccaagtcaagctgctgagagcccctctcagacaggacaagccgaaaagaagaccagaccagctgcctggaaggagcagacacccgctgaccggcctggaagaggtttagcccaactgagtcacctgaagagagtactcatcatcctgctgagctgcctgtcagccatgcagtccttccagattcccagctctgtgagctgtcacccaggctgcggtgggcttcggtgaggcagctgtctttgagtcacttctgttcctgtcatggatggtcctgactacccaacttctcaagcatccaatgtcctcagagaaagggagaccagagcctgaaacctgcttgctcaggggtggagcttcccgatcaatcgttctgccacgcccactgctggaacctgctgctttgctgcttggagccatactcgtggtcaccctgctactggactctgagattatttggtgggaatcgggccccttcccctgcttcataactgcgtgcagaacagtaaatttgagctttgatc

SEQ ID NO: 887 - protein, 109 aa, Mus musculus
  VARIANT (1)...(109): Xaa = Any Amino Acid
AVTQAAVGFGEAAVFESLLFLSWMVLTTQLLKHPMSSEKGRPEPETCLLRGGASRSIVLPRPLLEPAALLLGAILVVTLLLDSEIIWWESGPFPCFITACRTVNLSFDX

SEQ ID NO: 888 - DNA, 40493 bp, Mus musculus
  misc_feature (1)...(40493): n = A, C, G or T/U
ttgcaactgagactgcaccttcaccaatggcaatggtatgttgggcaaatgctccgtcacctacagtcccagcatggaatctctcttcttaatttatgaccccacctccacctctggaatgctgggattaaagtttcgcaccaagagagaaaataaatgcaagtcctataggaagtgaggtctcagaccttctcttttctctcttggtcatgtggagtttgtctcatgctgtttctttcacccattaagaagtggtcaactgagtcctgccaatgtggaacaacccccccccccccccaattctaatgatggctgtgtgtggaattgatctagtttctccgttttcccttctggttgcagttacaatggtatgccttttggcatctcttgctgtctatgtgcagggtatatagttgagagtggcctcaagttgctggggctcctcttgctcctcaaacgctgggattataggcaagtgcccccaccccaactctactgtcaatccattcggatttttgcaaccgatatttgctgttgctttcctgtaagtgtcttgtaaatgctgtctgtacagctgcaggacttgttattgatcaagatacagggatgcaagcaattatagcccagcaactgtagttaccttaccatgtactctggaacttttcttatttcctttgttctttatcgtcgccacccccccccccccccgcccccagctgtcttttctcccgctttcactcagttctttaggcttacctttattttcctttcttctgaagccccgggacatcattggtgatgaggttgggtaaagacccttccttcaggcctgagaaggctccagggaaggctttctcctgggggagaaatggccttcctgtgtgcagtattccaggtgtgaccttttcttactgaaaggcaaaagcaaaacccaggtctgcagtgtgtggacctgggtgggttttacctgctggtcctgagagcacacacctgggccgctcccttcctgctggatgctcttccctgtggctcacgcagcagctcacgcaacacatcttagttcccaccaaggtttcactggcttatggctcttcaggcttctgatctcgagccgacttcaccccagtcctccaaggccaaggatatttcctgtttacgcagtggcttcctgtgtaaaggccagaatctcaagactttttgtgttttgataaattctactttttttttctttaactgttttttttttctgctactaattttcaacactaataattaacaactgtagattttgtgttgtgcgcaccacaccttactactgccagccatcgggttcctgtggtggtacatacctgtaaaccaacaactcggggcgtgaggcctagctagcccggcctgtgatggaggccctgctaaaagtcttaagaacgcaaaggtcatagtttcacattgcaccttgtatggtatgtttgtgacctatgtattcctacagagcaggatctttaaggatgcgttaccagctgaggaagcagtcagggaaccatcagaggctctaagacagcagtgctttaatcaacagtgtctgcgcgtctccagtttgctgttgttactaagtttgttcattcttagttttgtcaaattggtgaactgatgcttgatttttgtttttctttgcatctctggtgttctccatacatgttcaatgacggactcttcttacctgcaatggctggttattttaatttattgatttgtggttttgattgaatcagcccagctagccacagtccttaggtactggggttagagatgtgagctgtttggtttggctggtttttgtttcaggtacatattggtctagggtttttgattaaaataattctgtagatattctagttgctaagacttgattaaaccaagtattttgtacctgtttttttattagctcatttctttctgtctttgttgtttatttacatttcttttagacaggcatgcttctttctgcttgttttgcatgtctttttttaaaaagatttatttattactattatatctaagtacactgtagctgtcatcagatgcaccaggagagggcctcagatctcattacagatggttgtgagccaccatgtggttgctgggatttgaactcaggaccttcggaagagcagtcggtgctcttaaccactgagccatctctccagccctgttttgcatgtcttaatgtcgtggtattttactcatttttttttttaatcataacattaccttttgttttttgagacaggccctctctgtgtaactctgccaagcctggccctgtctatgctgatcaggccaacctcacagagatgtgcctgtgtctgcctcccagtgctgggattaaaggtccgcaccaccacacacatcaaaacatgtattttacactgtgtgaggaatggtagcattttctgcaccttagcccaacagcaaacttggacgttgggaaatagtgtggttgatctcatgcgggtattaattcggagaaaatgtctaaggtgaaaggaattttgggaaattgtctaaggcgagagtgcagaagggttatagctgaacactctgccctgtacttgagcagagtgatctcggatacacggtttcccaggcagccagggctacagaagccctgagctgtaaaagatcttcacaagccttccatacaatatataaacacttgcttttagagtgtgccagtgactgtgcgtatggctaaaagcatttatttcatattgtaaatggattacactaattagtaataccagctaaccttcattaaggtaaatgctatgctcctctgaggtctgtcagccatggttacgctgatagcaggagcctaagctggcggtggtggaggatgcttgcgtggaggcggtggtggaggatgcttgcgtggagatgactatagtgtctgctcatggctgtgagccgagtctgagtgctctctggcggttctgagtttcgtttgtacgctttctctactgagaaaagcttaaaggactaaagggatggtgagtttggagaatgttaggaaataggtcttaagtagtttgtcctataaaggagatgggtggttttagaacatctcacattgggctacatttctaatgactgacattgaaaggcaaagacctcagacttcagagggcagaaattccatcatcatcatcatcatcaacaacaacaacaacaacaacaacaacaacaccaccaccatctagtccttaatactctgcggagccttgaactcacaaaaatctaccttctactgcctctagagtgctgagattcaaagtgtggccaccatgcctagtaagaatttcatatactctgaatagtcttagtgacagtcatcctggctattaggatctcttaccaatgtagaatttttttaaagtctatctgtagttattttctaattcacacgtcacattgttaccttccgtgggctttgtagtaccctctaaaagtttgcttcttacactttgtgtggaagaaaaaactagattttttttcccctctagaaaaattaaaaggaggaaccgtgggtccttgatgaagctgtggtttatctgtttgtttgtttgtttgtttgtttgtttatcttctcctaagatgaaggacaaggtagcccagccatttgaagttttcagaacgcctctgggaggcagctggtgaccgggcacgtatattcaaagtgctgactattccttgggctgtgtgcttccataatttaaataatgaaaatccttttaaaggattttggaaggggaagtgtaaagtggtttgcaggcattaacataaaaggttagattaaggaatactgtctggattaaggcacattatcccattgatatttaaataccctcctgtgggtagtacaaacactttttctcttgtgtggggaaaaattgggtttgtgttggaaagcctgttaaacacattaattttcataactataataaaacccctaaacctttaacattcttcccaaaatgtaattgcatagtttgtctttctgctgtgtatcttgtatgtttctctaatcttctgcttgataattctctcgatttgggcatggtggcacaggcctgtaatctcactcagctcctagcaagctgaggctggaggcttgccatgagtatagtctaggcaaacctcagtagagcagtttgtatagtggtgagaccctgtatccaaaccaaacaataaaatctgcccttgagcattgactacctcattcattcattcattcattcattcattcattcatcctgtcttcctatcatctatctaatatagcatgcattatattttattgtatctattatgagtagcaatgatagtattggggatctatgtgtatatatgtttgtgtagatatatgtatatgtccatttcatcattttgcaagactctaacattcttgaggatttatattattttttacctcattaaacaactacaattataaagaggaatgaagtctcatgaccaaagtaatggaagaagataaatatttattgaatgtcagttatgcacttagaacatcatataaatgttgtctgcattttacgaaaaggcagacagtcatgagtggagatgtcacaggtgaagctcagatgcagggcgttgagagccttaagcccacgtggttttgtggagttctcatctttcctgcagctgtttctcagcatgacatactgtgttcagggattgtcaggaccctctagcctcagcctctgtgttgggggtaagggttagcacctactctgtagccttgtgagtttggttgttgttgtttttgagcaaagtgaaaatttctttatctttaggaaaaacttcagattctgatcatttctttatgttaaataagcattaagcttacagttcctgtcttggggttttactgttgtgaacagacaccacgaccaaggcatctcttataaggacaacatttaattaggcttataggttcaaaggttcagttcattattatcaaggagggaacatggcagcatccaggcaggcttggtgcaggaggagctgagagttctacatcttcatctgaaggctactagcagaagactgacttccaggcagctagggtgagggtgagggtcttatttcccacacccacagtgacaaacctattccaattgggccacacattctaatagtgccactgcctgggctgagcatatgcaaaccatcacagtttccaagaattgtttattctaaaatagatacaatagatctggtatttcagaactcgattttagctgaaaacctaaattcccctccagccttatttttgcccctttgctaatagaggtgattcattgtctcctagcagacttcattagagaacaaaaacaattacattcccagtagcagaataaatgatatgcttcatagcgacaaatgtaactgtaaaagatttctacactagtattattggccactgctgagaggtggaggagagacatcctatgcttggcgattgggtagattcatgtaaaaacgcctgaagaaccagttcccacactttccaaacccacgtggcattctctacaaaactagaaaggaataaacaaatgaacgaacaaaactctgtactagcagcagcagcagcagtgacagcatgcactggtgtccaggctgtgcaggatgcacaaacagtctgatgccgactggaagttggaggttcatgttcaacgtgataagatctgaagtaaataaccaaacaaaagtcttaatagagataccctttacagcagtggtgaagaagaaaataacaaagctggaggctttctgttttctggttcccaaatatatcccatgtcaaattcaccttcttcagcagatgtacacaccgtgggcaaagatggtcctataataagtggatttggtaaaactggaaacccaagtgcagaaaactgaaattaaactcttactttacacggtgttttaaagtaaaagccaagtcaaaagagtttaaactagaaccaacagcgagtagggcaaagcaaatgaaagcttcttgctattggtttaggaattaatattgttggttttggcaccaagaagtcaacaaaagcagataagactgaattagaggtgaacctctctgcagagcaaaggcagcagccagcatgaaaagaccacctatgggcagcagccagcatgaaaagaccacctatgggcagcagccagcatgaaaagaccacctatgggcagcagccagcatgaaaagaccacctatgggcagcagccagcatgaaaagaccacctatgggcagcagccagcatgaaaagaccacctatgggcagcagccagcatgaaaagaccacctatgggcagcagccagcatgaaaagaccacctatgggcagcagccagcatgaaaagaccacctatgggcagcaggaaatgccgcttgcccggtgcctgtacctgttaagaggttaggtctcaaacatacaggagactcaaatgacttggtagtaaattcccaaataacccaaataaaaactgagccagtggtctggacatatacttctcaaaagaatatattgcaatgcgtgaggtttatatgaaaatgtgcttagcatcccggcatcagtgagatgcaaaccctaaccacgagctgctcctgtagtggtcgggtgactgttatgtaagaaatgttggccaggtagaaaaaaaatagaaagacagcctttgtacaccgttggtaggaatggaaattgatatagctattgcagaaactgtagaggcaccttaagatgctaaaattagagccatgcaatgatcctgcaatcctacttcttagatattgaaatgacattgatctcagatatctccattgccatgcttaccctcgggttattcacaatagccaagatagagaaacaatccacatgcctcttgctgtggtggtttgaatgcaattggcccctgtaggcgtctttctatatatggatgtttgattctcagttggtggactatttaggaagtataaagcctttggaggactgggtcactgggagtgagctttgaggtttcaaaagccagcaccaagctcagtctgtccgtcagtcaccttctctctgtctctctgactgccttcctccttgtctgtctgtctgtcatttatctatatcatctgtctgtctgtgtctgtctagtggataagatgcaagctgtcagctactggtccagtgctattcctgcccctgcctgctgtgctccctgttaggatgatcatggacgaatgcttgcttacatgaaactctaagcaagccccaattaaatgcttttattaaaaaaaaaaataaactgagggctgatgaaatggtttagtgggtaagagcactgactgctcttccgaaggtcctgagttcaaatcctagttaccatatggtggctcacaaccacccataatgagatctgacgcccccttctggtgcgtctcaagacagctacagtgtacttatgtataacaataaacaaatcttcgggccagagctagcagggactgagtaagcagagttgactggagaaagtgggacgaccggagtgagtggggttgactggaacaagcagaggtcctaaatacaattcccaacaaccacatgtagctcacaaccatctgtacagctacagtgtactcatatacataaaaataaataaataaatattttaaaaaattgccttggtcatggtgccccttcacagcaatagaatagtaactaatacaatatgtaaatggattagaaagaatgacataagaatatatacccaggccaggcagtggttggtggtacatgcctttaatcccagcacttgggaggcagaggcaggtggatttctgagtttgaggccagcctggtgtacagagtgagttccaggacagccagggctatatataaaaaccccatctcgaagcccccctcccagaaaaaaagaatgtatacccagtagactagtactcagccgtcctgagccatagagaatacagaagaatacagaaaccctttctttaatttgcaattgatatggatcaaccttgaataccttatgttaagtgtgaattaaggaggctttgcaaatatagatactagatgttctcagttatgtgacaactcagcctagtcagtcaccagaggtgggggtatgtgtgtgtgtgggggggggggtaagtagaggagctgtggatcaagggtacaaagttctagacatctactccacagcagtatgacacaagtgggaacactcaattgaatgatcagcatttgctaaatggatagatggacaggatcctcaccatgcatgaccccacccccactccttttttacaagattaattaatttttttgtgctctcctgtgtgatttttaagtgcagcacatgtgtgcaggtgcctacagaggccagaggaggccatgagatgccttggcactgaggttgcagatgcttgtgagtggcccagtgtgcatgcctactgatcactttcacgtttacttctgacctggaggttttcagggccataacatactggcacatcagtaggccttttggatgtatatgctgaaaccgttttactaacattgggcaggcttaagttatacttttatgagtttattggacatccctaaactgggctcatttttctttgttactttgtaggtaagtattttcagccttttgcctgcctccaagagctctttgttgcagtggggcccttgactataatactgattgtgctttgcacagtagggactccacacacacgcagaacaacccaaggcagagctggggcacatagagtgccaagtgcaagcctgtggccagacacagttctctagggcacggtgcttcagatccttgttctcaaagttttaagaaaccagcaagtgtcacatagtaggtaaatccctgctcagacacagcctttcttttcctgaggggtagcatacaggttcatgtaacggcagccatagtaaaagcaggcacggctacttgcttgcagactaaaaagaaacttagtttcacccagattgtcctgatccatcatgttcttccagccttcctgacttcctttgttagatttcctggctttgtgtctgagatcagctaattcccggcacagttggaaataaccgaatggctgttgatgctttttgaaattatgattgagtccacagactcttgcactcagtggttagttattgccttgggtccagtgagggatgcatgttacataactgcacagtgcgcatgcatgcatccttacctaaaatacacatcatcgcagagtggccacccttaccacacgcaccagtggcttctttgctatttctttaaaatgtctatgactgtgatgagttaatgggacttaacaaaggtttccaaccacagtttaagaaagtggtctttagttgtatgatcaatcttttcacatttatgacgtgtaaggggatatcatcccacttgattcgtgtgttttcagactaacagatggttcatcacatgcacagagtccttcgcaacaagacaatttcaagttgaaactagaaggcttgtggggtttgattgtaggtgtgggaggtcaggattcacttcctggctgtgttccttctgcatgtactcaactgttgagccacacggggtagcaaggtttctgatccccttaggattcgcactggatattaaatgactggggaagcagattttacttgccccattgtattgtatataacttttgtgggaaccagtatggagttgaggttgcgtggttcatagggttgttctgggggctcatcaaccctgcctctctgcgtctaaagaagcggcagattgttggcccgtcataggactatttaaagttctcacatgctggcttagtcgaggcaaaggcggggacatgttgactcttcacgtcttgacattttccttacagaaacagcagtgtgtttcacccaccagccaagatgaacatggtgaagaggatcatggggcggcctcggcaggaggagtgcagcccgcaagacaacgccttaggcctgatgcacctccgccggctcttcaccgagctgtgccaccctccgaggcacatgacccagaaggagcaggaggagaagctatacatgatgctgccagtgtttaacagggtaagtctggcttgccacagcattccttccaggaggccactgctggcgataacatgggacctgttttctttctgggtttgcagtaagtcagatgttgagcacgcatctgtagtcatggcaccagggagagactgagaagatggtggaggggcggggctcacggtcagcctgcgctacagagtgagagccacggctccaaagtgtttgttttcctttccatttctgtagtgagagaggctgactcttcagccctgacactgggttttagaagaggcaagattgtcggttgtcctgtgttactctgttgcgcaattgcaaagcccttagtaatctttgaagttgtcacaggtggcatggcagtgccgcctttaaccttggcactcagaaggcaggtagaactgggctagcctgggctatatagcgagaccatctcaaaggaaatgccactacagtgtgctctgttcagctggctttctggcacatcacaaaaggggagagttgctatctacagagaatataaagagactcatgtattgctattacagcacaaaatgattttgttgctactgggtttttaaaccatttttaaaatgacttcttggtatggaccaaaggtttgcaggcatgtagctttgagaagtttaggagctctgtggtgggcttggggcttctgctgttgtccactaatgctgctgtcatggagctcttaacacaggtttttatcgcactgtcctgcctgcccttttctcattgtgagaacctgcttcctgccccttccaaccacaatacactccatccccctgcctcaaacactccagtccccctgcctcacacactccagtccccttgcttcacacattccagcccccctgcctcacacattcaatccccctgcctcacacactccagtccccctgcttcacacattccaggccccctgcctcatacattcaatccccctgcctcatacactgctctctccccttctccatgcagttgtgcctaatgatcctcagtgtgtattggccctggctgaggagtcagtgtcctgcaaaagtgaatcttggggtgtgtcacctttgccctttcagacctgctccctaacgccctaatctctttagtttctttttcctccctgccctctcctcttcttgtctccccattcccatcccctctcagccccttctctctgatctctctgtgttcctggccccttttttctttctcctctctctctctctctctctctctctcttcctcctgactccatctctctaacacacgcctatgatttctcactccattcctcccaactctgtcccttccgagatctcctttcccttccactctgtctcctgtcctttccctccttagtttctgattcactcactccatctctctattattctctctgttggcttatcatctggaaactgcaggctgtccttttcccctaatctgcgctgatatttaaggatgagatactgaaaatacttgggagattttgtgtatagtaaattgggagctctcgtgctgagatggcgtggctgggttatctggcttccacagttgagatctctcccagtcataatatccacagtgcttatttcttgactgtgctcttatcttaggaagcaggcgtttttatcagctcgatacaagtgttttcttgaagctacgttgtggatggagtgagggtgatagttcatattcagtaggtaggattttacctaatctccagtttttctgtattactgccttgtctttggtctgtgctggagtcaggatttcagatgtgtattgcacttggagcaaggcagtcatcttcattttctgggttgtaaagtagaaataagcttatccacctgaagtggttacttttctcatttcccaatcaacataacttaaggaaaacttaatgttcattttggctcacagtttaaagtcacaggctgtcgtggtgcagggattataatggcaggagtttgaggaaaccgatcacactgcatccatggtcggaagcagggggagatgaatactcagtgctctgcacactttcctgtgtgctgctcaattatggtgagtctttttacctcagtcagtagaaactagagaatccctctcaggcacactcagaggctaacctgagcagacagccctcccagctgtgcccagaggctaacctaagcagacagccctcccagctgtgcccagaggccaacctgagcagacagccctcacagctgtgcccagaggccaacctgagcaaacagctctcccaggtgtgcccagaggccaacctgagcagacagccctcccaggtgtgcccagaggccaacctgagcaaacagctcttacagctgtgcccagaggccaacctgagcagacagccctcacagctgtgcccagaggctaacctaagcagacagccctcccagctgtgcccagaggccaacctgagcagacagccctcacagctgtgcccagaggccaacctgagcaaacagctctcccaggtgtgcccagaggccaacctgagcaaacagccctcccaggtgtgcccagaggccaacctgagcaaacagctctcacagctgtgcccagaggctaacctgagcaaacagccctcacagctgtgcccagaggctaacctaagcagacagccctcacagctgtgcccagaggctaacctgagcaaacagccctcacagctgtgcccagaggctaacctgagcagacagccctcacagctgtgcccagaggccaacctgagcaaacagccctcacagctgtgcccagaggccaacctgagcaaacagccctcccaggtgtgcccagaggctaacctggctaagcagacacagtctgaagtggagctagaaggcagtggcttgaggagtgaatgggagaagaaaggaatatactaggctttgctgggtttgaaagaaattctaacaacagatactggtagaagttctgttagcttggtgtccctatgacaaaacacttgaggttgggcattttgtgtgagaaagaagttggaaggtcttgacaaggaaggtactgagtcaggctagagaaacaaaaggtgagatcatagtgggtccctgagggaagtcagtggaggaactcccacaggagcagggggaggaaccatcctcccacgtcaaggattaattaagacagtgccccacagacacccagggaccaccgcatggatgaggtgtgctctctctagatgactatagtttgtatcaagtaggcaaaaacccggcagcacataaggagatttgggggttttattattattactattttttgaagattaggaatattcaggcttgatcatttaaaaaaaaggacaataaacttagatcaaaggagggaagagcagggtgtcaggttacaggtgggtggataagcagtgagctgtagtcatagaagtcagaaaaacagagctactctggagtgtaggagatcccttagggcgtctcttagtactaccatgtcctgtgattaaagtcaatgggaaactacaacagcctaatccaagcaggatgacaaaggacgcagacccatcaggaatgaaggtatgggtcaatcctccaggaaaagagccaagacctgctgaggtgctggctgaaggagaaggaaatacagaatgggtagtagaggaaggtagttataaataccaattaaggccacgtaaccagttgcagaaacgaggattataaagtaatatgaatgcccattgtaaannnnnnnnnnnnnnnnnnnntttactaatgcgtttgcgattgtacgagggatagttatatgatgttaggcgtatttacaaccttgttattgtttcatgtgaacacgagatattatttgtgtcaagttgacaaggggtggattgtagtggctattcctggttgtcaacttgacaatatttggaatgaactacaatccggaattggaaggctcaccagtgacccttatctggaggcttggagatccttatctggatcttggtttgaagatcttgagccatagtggctatggattccagaagattgaatctccgagtttaaggaacacacctttaatctgggctatgcctttcatctgggattaaaggtgtggtggaacacacctttaatctgggctacaccttctgctggagacaatataaggacattggaagaagggagtctagctctagctcttgctcttgctcctttgcctgcttgctgcgtgagactgagtaactgctagatccttggacttccattcacagctgcgactgaacaattgttgggaattcggctgccgactatgtataagtgctgaggacaaagagaagagtcagagaaactgagctgaggagaatttcctcatgtggcgaaggcattatttcaaggggtggggctgagggtactacttcctcaggtggggcaaacccttgagaatctgaagattcaaaattctcagcttcaacatggtcttcccacacatccccgtcccatgttataggatcccattctttgccaattagagcccttactttaactgtcgacacactctgaggctgagacttgaattttcgctgtagttcagccaaccttacaatgagagtttctgttttgattttctgcaacttgagctctattgctacaagagagaagattctcctcaaggacacacttagcaacttttagatcgtttacttgtgtctggagcctttcgattttatcacacaactccttcctttcattcatcattttttccacagatactaagagcaaccagccagtaaaatcattttccgattttttccccatcttgtagaaagctttgtgcactgaatcacctaattcattaagaaaatcaagggcattagcttctttaagttcggaatatagtttcaaccatgggtcttcaaaattctctgagctcccaggagggagagaatctggagaggtttcaatagttgaaagtgctggtggatcaacaagccaattccagtattttaaaagattcatccttgtacttctgttactctagaaccactcctggtaccaacttctgtattagtcagggttctctagagtcacagaacttacggatagtctctagttagtagctcccctctaggagcctgttttgctttgagtctggttacaggtctagaagaaactattggtgggccgtgagcagactctgcaaaattaatttcctcatgtggggaaggcattatttcaagaggtggggctgagggtactacttcctcaggtggggcaaacccttgagaatctgaggattcaaaattctcagcttcaacatggtcttcccacacatccccatcccatgttgtaggatcccattctttgccaattagagcccttactttaactgtcgctggtgtgaatatggatgtgtgatgctgtcggagaagaccttgcttggagaccttagcctcctgttgcctttggcagaaaatgtccttcagggatctagagtaggtagactggagagtgagcctaggatagtgtggagagggggaagcagtgctgactcctgagtattaagattgtagaggccgtcggaggtgactgtactctcactgcgccttgtccagttggtcctgtcatggagatagcgggtacctcgtgcgttgggatttcctaggcgctcagtcagagtagctgggatggaggagcatgggagggattcgctcacacagcatctgttgggttgtgctccatagagtacagagagaatgaaaatacgaatatgttcatagaacatgctttttctcttcgctgtctgccaagagtgatgagggaggagatggtagtagaggagcccgaggagggagagggttaaaatagccatttgaaagtgggagcagaatcctgtcgggagtctggtatggctgtcccctgagaggctgtaccagcacctgaccaatacagatgctgatacacacacccaactgttagactgagcctgggacccaatggaagagctaggggaaggactgaaggagctgaaggggattgcaaccacataggaagaacaatatcaactaaccagatcccccagggctcccagggactaaaccaccaaccaaagagtacatgtggagcggcccatgactccagctgcgtatgtggcagaagatggccttatccaacatcagtgggaggagaggattttggtactgtgaaggctctatgccccagcatagggggatgctagggaggtgaggtgggagtggatgggtgggtgggggagctccctcatacagtcaaaggggaagaagggtgggatgggggagttgtggaggggtatcagagaagggggggggtatcgtttgaaacaaaaacgaataaggttaattaaaaaaacaaaacaaaaccatgggagcagaaatggctgtgagcaggccgctggttcaagccccgttcatgaaagtcctcagtcttattggaaccagtaaaatttacaagaacattgtaagatgtttttgtttttctacttcatagttctctttttaaaaaacatatgatactctactggctattgattggtgtaagataattcccttctctcagacgatgagcatctcaaaggcacggtaattgtttagcgcagttacaggaattgctttcagcttttctattgtggctccttgggttggaacttagagcctcctgtatgcctcaccagtagtgtacacctgagcttcctgccagcttgcgtctgatctctctgtgttcatcatgaacgctgacgtggtatctgacttctgcctgattagaagtactggcataggcagttcccaaacctctgtatgatgttatttgaccatccgaggtttggaattctctctctgtctctgtctctgtctctgtctctgtctctctgtctctctctctctctctctctctctctctctctctgtgtgtgtgtgtgtctgtgtgtgtgcttaggcaagtgtcctaccatagaggtacacttaagttcctaggaaattcccaagtaatgtcaggattgaatgttatttctatacaattataactgattaaagtttccaaattatattcattgcatgaacactaacaagcacaaacttccatttctaaaaatatctacaaattgatagttatttgtttagtaatgtttggccatttatccacgaatattctccgctaacaggaaatattcttggtgaattgaatgacttagtatggtgttatggccaaccagttcatacagtatttatgaaaatgagttgactttttttttttttgcgactttgactaatttgtgcttcatatggttggacacaggctcctctgtacagatagcttctaacatttgcctgtgagtgttatttcagtgtgtgactctttacttctcaagacatggttaatattgacatgtgctgagtattttttcctgggccaggctttatgcacacttcttgaaatgcctcccatggcctctgtcatggtcctgcatacagggcaactgctgttatcctccatctcaaactacaggattagggggagtctgaggacagagggcattctgaaaaataattaacctttatgtccaagagcaaaacctcacagaaaaaaaaattactccaaacaaaacttttcgaaatgaataggtttttattgtctgaaatttcataaaaggccattgttaattatcatagtatatcaccatagtcttattttgaaattaatatttatgaactcgatcctcaagaaattcttcttgcttttgaaagtatttccagcttttatttgagaagtatacaagttgaagactgttcaaattccttacaagtgacatttgcttttaaaattgttggctttagacagggccacacacgcttagaatcaggtaagaaaaagatctcaaattcaaacagattatgtgttttgttgcattttttatatccataacagttatttaaggactattggtcagtattgtacatattgtacttatgtagaaggttttctaaacattccaacttcttttattccctatatttccttcttgtttaataataccattcaataacaaatatagactggggtcccaatttatgcatattattaaataataccgttaatttattttctctgaatttgtcagaaatacttattttagttcaagtgcttagaaaaatttttcaacatttaggtagatattaaaaattagtgttttaagagggattagggaataacatgtctctcacttgtgcaaggttctgggtttgattcacgaccctgttaaaattaaaaactaacctattaaaataactcttttaataccaagttaagttctgttacatctcgctaaaggcatagtgtatgctgagttacaggggtagggctcagacagtttaattgagaaaacagtactgagtgcttctcagaatcagagtggcctcgtctgtagtcttgttctaagtgtggtataggttaacttagcgatccttaattcccttagctgtgaagggaggagggaactgccctgctttgtagtttttttgttttttttttttaacacttcttgtttttatttcttatgtgtaagtacactgtagctgtcttcagacactccagaagagggcgccagatctcgttatggttgtgagctaccatgtggttgctgggaattgaactcaggacctctggaagagcagtcagtgctcttaaccactgagccatctctccagcccttaattagactcttaattaatgatgtcttaagcatttgaaccctgctaggaacactgtaaatccttgtcatctccaaatattgttattattgaatgtgttatcaggtagtgttcctcagatctgtcattcccctcaacccacagtctgggtcacaaatagcacaaatttattataaaaccacaatttttgtatgaaatgtgctgagtttgagtctccctctctgtctctctgtctctgtctctgtctctctctctctttttttttttttttgacagggtctcactgtttagccctagctgtcctggaactcactctgtagaccaggctggtctcgaactcagaaatacgactgcttctgcctcccaagtgctgggtttaaaggcgtgtgccaccactgcctgtcttgagtctccttcttgactgtctcccttgatgggtgggaatccttgagtaagtttctgagagagagagagagagagagagagatggggcgcgggatggaggggagagaaagaaagacagagacagatgcaaatggagagacagaggtagacagagacacacagagagagagacagagatgcacacagagagacaaggagaggaggagagagcattagagagaacgtgccaggaaccccagtctcttcatagctccatgctccgtccttcccatcacacatttggttgaaggtggtgaaacattcttggtgtttatggatggagatactgtagtcaggcacaaagaacgcgcttttgtttgtagccccctgtgtggccatcttccccacactgaggttttacttgctgcgttcttccattttaccttggtccaggccacccggactcttcctctctctaccactgtgaccccattggtaggtacccctgatattggagttctagatgatggtgagtcttctaatgtgggaactgaacttgggtcctctgccagcgcagcaaatgctcttaatagcctgagccatctctctagccttttaaattaattttaattccaatattcttgtttacctttggtagtggcggtagagcccagggactcctacattctaagtgctcgcccactactgagctggacccacccccagctttaatagttattttggtttttgaagcagaatctctttgcagttctgagacttccaggccataggattataggcataaattataaaattataaactgcgaaattatagtctgtgctattcgtgtgtgtgtgtgttagttagttactaactacgaggtgaactgggccataataatttttaaggtaatttgcttaccatctggattaaagtgtgaacttagatactggaatctagagtatagtcttcatttacctgtgttttcacaacttttagatcaccacttgacacatagacagaggtcaggaactatttgtgaatacttttgaatcttgtgaaaagatttcttggtgaaaattaagcaataaaatccttgtttgcttgaatcactacattctgtactctagaagaaacggctgtttttataaactttcttcaactcttacaagtggtaagaattcaagtgtgcatcattaataggtgtttgaataggctggagagatggtgtgctaatttgttgaggtagattggtcttgcttgcagtgtagcccagctggtagagttacttgcttggcatgcttgaagctgtgagctcggacacaagtatcacaaaaagagggagctgtgcatcttatttgacaggtgatagatttagctaaaaatgttcttttttcaaagactcgtagcagggggctggagagatggtgtgtcggggaggggctggagagatgggtcagtgattaaggacactggcgtctcttgcaaaggtcccagactcagtttccagccccacatggcagttctccacagaccataacttcagttccggggcatctggtgcagtcttctggcctccacggacccaggcaaacgtgtctttatgcacacggtgcacatacacaagtgcaggcaaaacatacatgtataaataaatcactgttattaaactttaaaaactgaagcagggggaaaaaaaagaagccaggtcgtcgtggcagtgcctttgatcccagggctcagcaggcagaggcgggtgaatctctgaatttgaagtagcctggtctacagagtgagtttcaggacagccagggctacacagagaaaccctgcctcaaacaacaaaacaaatatgaaaaagcaagcaagcaagcaagcaagcatcagggaagaatagaggaattctgtaaatgcagtttggtgcagttgctgggacaggttactccttgagcagagtagcctttgcaccgtttctgttatgtttagcctaatttgaagcagtgtctatgtaaggatgtaggaaacatcttttgttaaaatgatattgtgaggtcctctgcctctgttactaggctctgtggaataaagtcttttattattgtatggaaaagtccagactgagacgtcctcatgcgtacggtatacccgtatcatgcgtccgccttagggagactgcgtcggaggagtatgattgactagcttttccttttcactaattgagccagacccgggagcacaatgcgggtccctctgggttgctctgcctctttatttgctggtttatttttggtttgcttttggttttgagacaatgtcttactatgtgacacagactgctctggcctccgggctccccatcccagcttcctgagctgggggtatagttgtgtctctcatagatagatagatagatagatagatagatagatagatagatagatagatagttgtatagtcccagtcagccccagtgttcctttagcagcctccaggtagtgttcgcttataggaacagtcacaaccagccttacttagggggcgctcctgcaaaaccatagtgtggtgttagcttgggaaagtgtgtggactgcgcccgatctctttatagtgacattgggatattgataatatgaatactatattataagtgggagctgttatgacagcctcacagacagtattcccatgcagtgtctctctatgatgggctgtctggctttcattccatccctctttgctgagcccacagcagcttactgtaagaattatttattccacagttcatttgtccgaagtttccaagaaagcaagctcgtttacgggcttcctaaccattgccttgtcattttcatgacagccttatattagggacgactgtggttagaactcagaaacttgtaaaatattgaatgaggagtaagggtccatcagcccctgctttctcccatcgaagaacctccccccgagtgacgtctctcaaaggtctcattcaggtttccttggagaatggttgttttctgaggtttgttagtgagacttttccacctgatttatgcctggtacattcgtatgtataaagacatgtggccagatgtgatctttcaaaagccatgatctttaggtgtaaacaggtccagaggaaatgtcactgcactcatgtaacttgatcttcaagttatgtcacattttgaacttgataattaaaaaacaaacaaacacacaaacaaacaaaaggccggtacgtcatgaaatgtgttctctcatccacaggtttttggaaatgctcctccaaatacaatgacagagaaattttctgaccttctgcagttcacaacgcaagtctcccgactcatggtgacggagatccggaggagagcttcaaacaaatccacaggtacttatagaagctgacctaagtgggccatgggggcagccgctctctaaaagtgctgctgaaattccgtgggagggagcccggccagtctgcagtctgcccgcccaggttctcctcttcattcttgcttccttcctgtattttgatctaaatgctctttctctgtccacatagatgactgactgtgtttacactcctgtcccgactaagctcctcccctaaggacagtgcttacctcagttcctcttaccagtctggattaagtcacacttccttggtgcaatgttctcgactgctgtaatcaagacatttttcactcttccaaagtacacttttgtttctcagcttcatgagtggtgtgtgtgcctctgtgtgtgtgtgtctgtttcctgttacaccataagtaacttaagggctgttctgtttagttttttccagcttgactaaagctacaatcacttgggaagagggaagctcagttgagagcagagttctcacccgattggcctgcagggcgctttcttgattaatgattgatgtgggagggctctggtcaccgagtggagggcaggccgctctgtaaaaggcaatgccacccctggaccccatggtcttggatactataggaaagcaggctgagcaagccagtaaaggacattcctccagggcttttgtttcgtcccctgccttgagttcctccgacttcccctgccttatggacccttgcctaggagccaaagaggaaatgaatgttttcctctgtaagttgcctgtggtcatgtgtttcatatcagctacaggaaccctaaatcaggggttaggccagcgaggtcattctgcaggagcccagggagactgtcatctgggacaatcttgtagcaaggaccgggtcaatcctccttttgacaaaaagtcctggttgtggctggtaacctggtaccatgagatcagagtaaggttgtcttgctgagcctatcattggtgatgtttctcttagtggaggaaaaatttcccagagaattactcagacttgcttagaagacatatctgccttgggagcttgaaagccggcaggaggggaggaggaaggctgtgcactctctgcattaggtttctgctttgttctgtgtactgggtagttttctgctttacagatggctcccttctctccctgagctcagctgagagagagccagcgctcaggactttcctagtgtaagtactcatcccattgtgaaggactcaccctcaggaccagatcccagcctgctcctttcccagatcccagcctgcttctttctcagatgctccatctgtgtgtagcatcacaggggcatggcagcgcagaccagagcactggcttcagcaattagagttacatacatgatctgagatgttcatcttagcccatggataactagaatgtctttaattgaggattaattccattcgtgtgaggggatgcaatacgttattcaatgaatagatttgaaactgaggcagctttgattgcattagcacctgaaaagcgtctaatgaaagggatggttaaaacgtctgacctcattccctcctgcacccaaagtgggactgactcctctctctctctctctctctctctctctctctctctctctctctctctctctctctctctctctctctctgtttgttatttcgagacagggtttctctgtgtagccctggctgtcctggaactcactctgtagaccaggctggcctcgaaactcagaaatccacctgcctcttcctcccaagtgctgggattacaggcatgcgccaccactgcccggcaactgactcctctcttagcacacactcttgttctagttaattttgtcagagcagagatttgtgatgtaagatttgtatgactgtgaacgggtagcaggaagggaaatttctcagtgacgttagctccagtcattttctgtccggaatgacacctgagattaggaaatgtccccagacttatttcactagcttctctgtcctcattgttgatatcctctcaggctgagctgtctgtgggaagtcgtggtgctaactacatatttgttttctttgctccctcgaagatcttatacgcataagacaatcttttgggtgagatgacaggtggatgtcttaaatagagagtgtgtttcattcttaactatggtaatagttacacaaatatttaattttgaagtgtttataaacccccccccccaggacatagcaagaataatacaagaatacaatgcaataatgcaagaatctcaggatgcccctcattttcttcccattgctggcatctcattgttaagggattataaggtatatagttaccatattttgtatgctcatttagctttaacatcttaaagcttatttagatttcttaagagttcactctgtacagttagttacgtcttcagtgtgtcgtggaggacatcgctacatgccgaggccctggttaaacccagtagtgcagtcctcagtggtaccatgccgggtatagagaggctggtgatgatggcccagtcctccagcgacagggttagagacttgtcctggatcctagttacacattcctgcctttctttccaacctgaaaagcattgtgctgtgctccaagaagttcagagccacaacaccgtcaggtaatttcgttcccaaggtgtgcacatgtggcacataaaaagaagcaaatacagaggttgcagaaatctgtaaatttacagatctctctctctctctcttttcttttaattttgtttgtttatttgtttgtttgttttgttttgcttcgtgagatagccaaggctatttagggcttctttttaatccattaataaaatgaatgcagtgatactattaatttgactcacaccatcatcctgaagcataattggattgagcagcttgtgcctgcagggtacttcacagcggaaggaagggagtcaacttcactagttgctctaaatttgtcttctggaactcattcgttgtttgtctgtgtgtctttgtgtacgttctttgcctagttaacctaattcaagctctaatgtctccatgttcagttcttttttttcctcttctgtttctcttgataatgcagtggcaaaggtgaggtttatattgcttgctataactcagagttgagttaatgtgtgtcttcactaatgctaaaacccttaagtcatcattccacttaggtttgtaagtgtcactgaagttaaaagatagacacaatgtctgtggctagaagtcaggggtttggttttccactgagctacatcctcagcctggacaaaaagtcttaagtcttaaagttgctataaatgaagtttatgcttacacggcctgcttcttcattaaataaacagtgggggattcctttgtaaataacagtatgttgaaattggcagggtaaagcgaaaggttcttctgtatcatttgttgtatgagggtgtaatatatttcttgttgatgcttaagattattgtctttagttacgtgtgtgtgtgtgtgtgtgtgtgtgtgtgtgtgtgtgtttgcatatgatagcagatgcctttggagaccaaaaaaggcatctaaaccccagaaactggagtcctagatagtcatgagctctcccatgtgggtgttgggaattgaactcacgtcctgtaagagcagtgtgtgtaaggagccactaggctctctctccagcctgataactcattttaccagggaaatttgggatttctccatatcatccagccataaaggtgtctataccttttcatccgttcggatatgtgattcaaagcccaacacccattgcaccctactgctggtgtaacttaggtctttcctacctgctccaaaaaaattgttcagcaaaggtgttgaagagacacaatgggggattatactatgttctttttattttcactattttatttgtcactcccacagagcatgagtattattaccgaatcatgcctgtcaccttcccccctagctcttttaaatcatgaagagtctcttaatattcactgtcagacaaaatatataaaaaaacacatccttgccaggcatggccatcagcgttgaagcagagagatcaggtgagccaggctagttgaagctgcatgagaaccaatctcaaagctaagacagatagagccaacaagattggtaggagtctgatgatgtaagtccagtcagtgggacctatggttgtagagagggccacttccaaagttgttttctaacttctgtattcatgctttgtaaggccttgcacacatgtccacacgtgtgtgcacgtgcgcgcgcgcgcacacacacaccataatcatgctaatggtaataataataataaataaataaatacaacaaaaaactactcatccctttcaagtataaatgcttattattgtacagataaatgcaataagcccaatgtactaatggtttaaaatcaaaatgtttttgatattttgattttaacatcctgtgttagtatctgacagtcttttgaatagcagcgaaaaaacacattttgccatttccttttgaagtcaatagcatccattccaaatgtattcaaaacctgtgtgtgtgtctatggcctttggccctctacaccaggagaaggccaacactctggcttgtaaagggtaatactggagacactggctggtgtcgttgttaggtcgtgtgccagcatgctagactagacacgctcagtcttgagaagtacaagtcagattctaaagatgttgcattctgaaattggaggcacacagtctaaaataacagttcccagttataaggagtgcgtttggtctgctttggtcaggagtgtcagctacctggggacatgtctaccttgcatctgtttaatccctctgagggcaagaggcatatggtttctgatccctgtcagtggcttctttgtttccttgtaagaagtagtttcatttcaatttttacaacaatttttcaagctacagttgctgaagtggattgccaagtgatggtcttttttttttctttcttttctgtataataagattgtctctactttgttagatacaagctcttttctccccttccttaaggttgaggaagcccagctgcccacaatgagctggatctgggtgacactgtgacatctttcctacactctggtcaggctgcctgttggcaggtacttactgagcacactcttagtggcagtactgtgttccatcaattgctacatctgtggctggagccatgggtccctccatgtgtactctttggttgatggtccagtccctggagctctggggagtttggttggttgatattgttgttcttcctgtggggctgcaaaccctgtcagctccttcagtccttcccctaactcctctattgaggaccccgtgctcagtccagtggttggctgcaagcatccacctctgtatttgtcaggcactaacagagcccctaaggacacagctatatcaggctcctgtcagcaagcagttcttggcatctgcaatagcgtctgcatttggtgactatatgggatggatccctaggtggggcagtctctggatgtcctttccttcagtctctgctccattctttgtccctgtatttcctttagacaggaacccttctgtgaatgtggagatgagtgggtgttttaatcactccccaattccagcctctctcccctttcctctctcactgaaacccccctttccaacaagacccctcctgctttcctgtctgtttctgaaagcactgaatttaagtaggattgccggcttgggcacaggcgggaggttgttttctggtgagctggcagcttttcaatgtgcttgcttgtgaagagagtggcaccctttatcccagccaccatcacagtctcccaggaaagggccctcctgagtccctccccttcctataaatgttggaggccctagtctgatacagaacttctgcaggtaactgtatctgtgttagccaggttcctaagttcagacgcacgtccacacaccggcacacatgctctgttcttccgttctcttttgttagcgtggactttggaggccacactcaggccctcctgcctgcacagtcagaacctgaacagccgaactctccagtaccttctgtctgtctgtctgtctgtctgtctcattccttatagactagagacagcttggatttaaatgtgagtttactgctggcaaagtacataccttgtccattttttaatttttctattattaatagaaataattcatccagttctgtgaaacctgaacaagctagaacctgggtcctgaaaatgtgcttatacagttcaggctcggtaagaacaaatggtttaatgtttcctgttcagatatttcttcaagttcaagtgtgttaagatgaacatgcctggcacggcaccatatataagatttgaattgttacctatgcaagcgcatttgactgtgttacactgaaggagaacaaggcacttctgaggttttacgttctagcctgcatcctgctttctggtgaagtgtgaagtctgttctggtgtcttcctggttcttcaggaggccctgcgacctgacaaattttattcatgccagatcttaaagttggtgaactgctgataaaattaaaaggatgtctagagatttctctcgtagatttctttattaaaatgatttattgtgatacattattcctgtgtccaaagtatactggtagagattaggatacagcttgtgggagccatttctctccttcctccagtgtcctggtcgaatctaatattcatgcttagcaacggccacttttacctgctgagccatcttgccagtcctggcaagtctgaagtcataactgactaaatggactttcaggtgttcttctaagtctacagttctgtgagtgaggctcatataccttactatttccccaggctagcctctcatgtagtctgtacccccagagtcttccgtgatcaccgagcctggaagcatctcactcttatcctgtgactgccattgtcactggccccatggtgtgcagctttcaggctaatagtctgaaagcagtgtgtcttccttttgatggaagtcttgcccagatcaagttcagccctctacttgcctgctttcatgactgatcacaccagtagtcttgatggggttgtatttcagagcttgggcctctctggatggtgacagcatagttgcttgccttcctcggtggtgtcgagctgcatcctctgcccctcttttgtttgaatgtcttgctcccattttctggctgccttcgcctccccagtccttaggcatgcctgcttccctggcagctgaagttcaggactcccctcctccttcagtgccgctcatgggctcatcatggtctttcccctaaagcacctttctacgtttccatcatagagatatgagtatataggtccaccagcatatccattaaaagattgagtttaattttttttcatagagaaaaaataatgctgccataaaatgggcccttgcgacccttctcctggtaccttttacaggtgtttcaggtttatacgggatttccctatttattgccttctctttgattttacagaggctgcaagtcgggccatagtccagttcctggagatcaatcagagtgaagaagccagtaggggctggatgctcctaacaacaattaacctgctggcatcctctggtcaggtgagtgcacagggtctgtgttcggtcactgagcctttctgtgggatttcgatcctgccgataatcgcttctggtctgtggactctgcttgtgcgcgtctcaggacagtttcatgcactgctgcgtcttgaacatcttcattcatgaggcgttacatggctcaggcagcatttccatctttgtcatgttgtaatgtacataaatgtaccaaagtggagccccacacacaacaagacagtggccattccacgggtggccagagggaagttgccaacacaccccacatgcctcagtcatgctagaacttctggcttgaaaactgtactcatgtgatgtcataagctaatgaataaatgacgcaggttattgataagcatttctgatagtattctgttgagtttcaggctggtggatgcttttacatggtttattctggagatggctctctatctctcctgacttttaagtctttgacctcatctgtgtcggagccatttgcataccttacctttgtccttcagacatcttgggatgcgaaggcttttgcagttttctaaaatctggagtatgggcacctaacagaaggaaagctaatgtgggtgcaagtttcctaaactgtgtgggcttagaaagcccacagtcattagcatgacacttataaaagtgactggtcaccgcagagacagtgagtacctttagcagctatagtcttaaagctgagcacagcactttggcctcttgggagggacagcccatgttctctgtagcataccgtttcatctctacccacgcatcccagtagagaacctgccacaccaacttgtcctgctttcaggacctgaactacttacatttgagcatagaaagccctgcatcccagacatcccgagtcccaggcaaggggaggtgtcctctcacccgaggaaccatcagatagtcctgacatagaccactgtttcagtgaccatgactgaactaggaaagtcctccattctatctgctgttaatgatacctgtaaatgcctctacaccacactaccaaaatttggtttaaggttccatatcatcatatgctgtttagatgttaacatttaagtggaatgctaccctatgtgttatggcttcactgcagtgtttctgaatgttaatactttctataaatgctagaatcgtcttctcattgtaagtggactgttgtcccggaacagcagcactatagaaactcactaatgtagatgagctacgtccttgaatgcatagactaagaaaaaggagcctggcatagagacgcacacttataagcaagaggctgaggcaggacgttggagaagtgtgaggccagcctaggctagacagtgagttagaggccagcctgggctgtgtaatgaaaccaagtctcagaaacagcaaaagagtctatcggtgccttcgtcacttaaaggataacaaacgggagctgccagtttagatgccaagttgtgtaagatgaaaatgagaaccatactgctttgcataacgcgaaggggaagctagtgataatttgactgggaaatgatgcacttaaaaagcagattcagcgatacgccttatgctactgcttttgtttgagtgccatcttctgctggcaccagcgtgagaccaagatggtggcagtcctgactctacatataggagacggagagacagtagagtatcgtgacataccgtgatgggctacgtgtacgtgtgagtgcagcccctccacagtagaaatgctgggattaaatgttttgaggttgagggttaggtcaaagaattggatctgggaaagttggagaaacaacaaagattttaactccctagacacctggtgttgtggggtgttgagaagcaggaatggatgctgtctgtgtagccatggctctcaaagtcttcttctctcctctccgtcgcccactgctgtatttggtcagactccagctctcctgtggctttctgtatgagtttccacacggatgccgctgctagtttgtggtctgtgctactccaggctgatgatttgaattttgcttctgttttattggtaatttcactgggctgggtgtcagccatcagtttaggagaatgtgagcccatgtgtacaggtcactgagccaatcctctcagctagctaacccttccacctgcagcagtctgtgtaagcgacgagactcagttgctctctctgtaaagtgaggtccgtgcaggactagtatcagccgtacagagttgactctgagggataaatcatggacctgtggaccttttgtttgtagactggaggagtcattattattgtggttttcaagtgtctgccattttggactcttgggttctgcagatatgccgccatagggactgacatcctgtgcgtcctcaggcagtggggttttccccctacttattttagttgtttgtaattatctgttttgttccagacattgttgatcattctatccctattaggttgtaggtactgccactgttggtgggcgtttatatcggagttacttatggatctgctaatgctcatagtgtatggacctttgaaaggctggcttcccagtgtttgcagctttggagctttccgtgtcctgtcaataaatatgtttgatgagacagcagatgagtgaattggaagataccagttcctcccgtagtctaacctcatgccacactgcaccctgggctttgttaatggcaacatacttcttagcaatattgaagtgattcctaaaaggttgtcttataatttcctcttgcaaatctttgaaaatgatccagtgtcatttgtattggtgatggctctgtctctcagatgtccttccacccaggaatgcccagtgagaataaagataaactcggcagtacaacaaatagtgcttagtgagttagttaattcattcgtttattttttggtaacaggattagactcagagcaagagttctacctccaaattcatctctaggcctgttctaagttttcttttgagacgggctctcagtaagttgacgagactggcctgttgtccagataaactttgacttgggagtctcctgtctctgctttctgggtagcaaggattgcagcctatgctgcctggcttagctttttattttattattttatttttatttcttattctgttgttttagataccatatttatcctgagatgtatgtacagttctattcatttgtgagagagggagagaggatgcccaggaaactgggaagtttcaccatttgttttgattaagagtgggtttcttagattctgcaagttcgtgttctttgaaacaggccccttcctaataaataagaaacacatttaataaatgacttactgcatgaccagcaaaccagtctcaacatgtgactgaagcaaatttgtccaagtgaccaactgactacagatcagtcaggtttgagttccctgctgcacagacgtgtgagtgccgctggtagatcatcctcctgcctgtccccagctgtcccatcacagttgtttccgtctgtctatctactcacttctgttggtttgttttccagaaaaccgtggactgcatgacaacgatgtcagtgccttccaccctggttaaatgtctgtatctgttctttgaccttccacatgtgcctgaggcaggtggaggcgcacagaacgagctacctctagcagagcgccgaggactactccagaaagcttttgtacaggtaaggggactgctcgtctgcacgcttgtttctggagctgtctttaaaatgagccagagcatggcccagctggtctgctttgccttgttctgtgttttaatcaggttctcactgcataggctgggctgacctcaagcccacagccccctgtctcagctcgcacatgccgaggttctaggagtgtaccccatacttggttgcttcttccactttttatggaatctcattctgtttattatgatacaacttttcctcataattaaatttccatgtaaacacaaaaggaatatggaagtactttcctagggcgtttgaagatggtgttaggtcttactgttatgtgttcctgctaacagatccagctgttaaaattacattggaagcatcagaaatggccctaaaattcaattgctaagggaaaccattcatttatcatattgagatttgggaaatacgccttatagtgacaagaaggtctgtgtaatttctttttatatataggattctccaagcttgtaaatattgaacttagaaaaacattgtcaattatactggctcctgccacctcccaccagctcctgccaccctctgcactttggagagccccttcctatcaccaccactgttctttcataagacagtgggtaattaaaggatctttctaaagtggcctggtaatacaagtaccctgtacggtgctcttctgtgggagaaagaaattgtttttaaacaagcaacctacaaacatcgagaacacagtgtgtccatggacctaatataattaaaagaaaaacaagacacttttatttcaaaaagacatactgaatgataaactcattcaaaaagaaaaacacggaaagttcgacaattccattgcacagcagtacatatactcaatcctacagaccatcacatcctgggctaaagatgatcaacttgaagcttttaaaaaacttcaccaagtggcaaaccaatagtacctcctttgtatgtaggtttctgaagttatgtgaccgaggatatggctttcccacctacagagtgacctacagagtgaaagaaaggcttttgagttttgagctgcagtcctctacttagcacaggctaaaaacttttaagagttgcttgctgctgttgccacaagttgtcacctttaaaaggtgccattggggcaaggacagagggacagctgtaatacacgtgaatcatcaaaccgaacaccaactcagtaaatatttgggaggcctggagatgtagctcagttggtagagtgagtgcctagcacgcaggaagtcatgggctcagacccccccccccccacacacacacactcctcgaactgcatggtggtacatacctgtaatcctagaaggcagggggtcagatcttcaggatcagactctgtaccaatggggttcaaagccatcttgtgcaagatgaaacctggctcaaaacaaataaaatatcttctgaacacttggttcagcgcatatgatgcttgatctaacatttaacactgtctcctgtaacttgagaagctatttaatttcagagcctttactcttctctagaacggctatattggcagttggcagatgtcggattaagtgaaggaatgcatcactggaattaaaagatgtgagatgttgctgatgagtgtagtgggttagcgttggcctcatttcaatgaagcccgtcttaaaaaaatttagctaagccaccatggaagctgattttctaattctagcatctacataagcataattcactttttatttaagaacttaataaatcccaggtgttagaaagcaatgggtggtgactttaaattagctcggggtttagccagacagtggtggcgcacacctttaatcccagcacttgagaatcagaggtaggcggatttctgagtttgaggccagcctggtttacagagtgagttccaggacagccaggactacacagagaaaccctgtcttaaaaaaacaaaaccaaaaaacaacaacaacaacaacaaaaacccaataataataaattagcttggggttcatgttaacatgttacagttgatgagtgctaaggtgcaaaggaaagcttcagccagacttgcccctcaagattgtgagacctgatgtcatgtgtatgacccacagtaggtacccatggtgaggactccgccccctcccacccgtggcgtggaccccatcttctccctgcccagtgctccttcactgttccagtccctttctttcctgccatcccaggctacataccctatctatcattttgctcagggcactgattgaggcagcttattaaacgtttcaagctagatggaatctccatgtttgtgttatatgacagatggttgctgcttcgcgcaggcattccctgtctggccaatgcaaacagtccttcctccaccacaattgcttccctacaactagaagtactgtgggggaggagaggcagaagcatttgacggcacttccggcccaccggaaaggatctggttaaatgatttgcaaaagtctttttgaccgtaaatttgggagccaattattttagggctcagcagtgaaggaaccattaaatatagttgactttgagaacggggattaaatgtggattttatttcctagttttttactattttggtttgttttctgttatgaattagagggatggtgtctgtcctaaccgcataaggcagcaccacaagcagaaacaaacagagctgacacctcctccatgtgcagcccctccgtgctgtgtttgcttgaggaaaggatgcatgcacacatgagcggatgctctgcacacagaagtttctccagacctttgtagagaggatgcctgtgtctgctaaccacgggagagagccttttgcccgctcactcctcagtcctcctctcttcctgtggggtggcagtatgagctaggaagcctgtgttatttaagaaagtcttggcttccaagaagacaaggagaatgtagcttgccaggcatggtatgccacatacttcctttctctagttcatctagcgacattctcactggcctcaagacatccacatttcatgtagaatgtctttaagctgatggaatgattttgtagtattttatatctcaaaaaaaaaattagaagatggagtttagcacagagaagttaactattcctgacattaaacttggatcacaagaaaggtaccattgagggcaaaatctatttggacttcttttgtggaacagaccctggcacagcaaagcacagagttagagtgggctcggacatcatggttaggtcatttctggaactgatgacctagagggtggctctcaaccctcctaatgcggcagcctttgatgcagttccttgtgatgtgatgaccccgtccactaagttttgttgttgatgatacttcattactgtaattttgctactgttacaaattataatattaatatctgcattttccaaaggtcttaggtgacctctgtgaaatgatcatttgacccccaacggagttacaacccacagattgagaaccccgctggtctagagtctgcagttgaaagcaggacttcaggaagtttctgtcaatttgatgtaattttacgctatccaacatttcctcctagtacataaactggaaacaatttaatactcactttcttttggctgtctttttttgtcagttaggccttttaatgtagaaaactatattttaccagtgcaaataaagaactaaattagaaggttagaacttctagttgtggtggtgtacagaggcagaggcaggaggatttctgttagttccaggctaacctgctctacaactgagtttcaggacagctagagctatatggagtatggtgtctcaaaaaaccaaaagagagagagagaggagagagagagaacattactgaactaaccatgaaatacagtattgctgtttatcctgattccaaatgaatcattcaaaggtataaggaagactggaaagtgaatatttttttaaggaaggcctctttaacatatacctagaccctttgtaactttgtagatgcctttgtaacatgttaagcagtgatcctgatatcctgaccacccagcaccctctctgaagctgagtgatgtttggtctcacttctgtcctgcctgccatcacggttctgtgttgcactctctcctttcctttgtgtttagatcttagtaaaactctgcagttttgtttctccggcggaggagctggcccagaaggacgacctacagcttttattcagtgcaataacctcttggtgccccccctataacctgccatggaggaagagcgcgggggaggtcctcatgaccatctcccgccacgggctgagcgtgaacgtggtgaagtatattcatggtgaggaccacactgtcttccttgtttctcttgtcatctctaggctgcccaaagattggactttcagttagttaattacacataaaatttgacaggtctctttggctgaggcagggaaatggagaattcaaggctcatcactgccacaaagtgagtttctgtccaatccggatgacttagtgagaccctttcctagattgaaaggaagaccaaggctgagagcagctcagtcacgcaccacctgactagcctgtgagagggagtgtccagtctctaggattccgtattccagatccataaacacagaaatttgccagcaggaagagaattgtttggtttgttgggtcttttccgacgcaagacattttcttaggttccacataatggatatgagcaagttaaaaattacttcttcattgtgcgagtgttcaattttaattcggtgtaggttatcattgactgattgttcttctaccaaaaagaagcaagtattttcaagtgctataattgaaaggaccaggattggtgcaggacccccaagaccaagttctcagcactaaggagattgatttgccccagagggacagagcgcaaggggtgagagacagagaggagatagagaatgagggagaagggaagtgatatttgcctctgcctctagatagagaggagacagatatggcccataggtaaataaatgtctgcttataaagggaaaaagagactctgtgttaggatgagtgtttaattttgactgggcatgttaattaggtaagccagttgctgggcttcaatactttgatagctgtactttggtagcaagcctcaggaagaggaactagcctgtaaggaatagcctttgaggcctagcttaagagatgtaatctagtgtggcttttagcaaggcagagggaatgggggaaggcccaggcctgccagagccgtgtttgccatgctggggactgtgagaacccttcagttattgccagtgtttctgaagtcatttcataaatactcaggtattctttctgatacaaaatagttaaaatagatggacctaagaaaatcagtattaaagagaattatctgcctagtatctacatagtatcacctgtcctttgagatgcttatgtgagcggtaattgctgtaacttctcaaatggtttacttattttgcatggatacacatacatgctaaagtgtcctgaaatttttgaattaactaattcaactacttgttttcttctacccgtgggaaacctaatacatcaataaagagatcaaaaatgatttggcagtgagcagtgatttagatttggtttaataatgacatcaaagtgtgatgaaagatctttgataaaagtcaacttgtccccagcacgctcatcctttgttactgtagcttagagaacctgccctggcatctgaaactctgtttgcccttagaataacgagcatttgtttaccttgcaccgtgttgcacgtacattaaaacttgaggcttctgtaagcacctttttcttaagcaatggccgtaaataatacagacttaaatttttattcttacagaaaaggaatgtttgtctacgtgtgtccagaatatgcagcaatcagatgacctgtctcccctcgaaattgttgaaatgtttgcgggactttcttgtttcctcaaagactccagtgatgtttcccaaacactgctggatgattttcggatatggcaaggatataactttctttgtgacctcttgctcaggtaaaccccacaacttaagggtccattttaagtttcaatggaaaccacaggataatcaggagaaatcagtaaacacttggtgcgttcttgttggctttgctcccccttc

SEQ ID NO: 889 - DNA, 445 bp, Mus musculus
aaacagcagtgtgtttcacccaccagccaagatgaacatggtgaagaggatcatggggcggcctcggcaggaggagtgcagcccgcaagacaacgccttaggcctgatgcacctccgccggctcttcaccgagctgtgccaccctccgaggcacatgacccagaaggagcaggaggagaagctatacatgatgctgccagtgtttaacagggtttttggaaatgctcctccaaatacaatgacagagaaattttctgaccttctgcagttcacaacgcaagtctcccgactcatggtgacggagatccggaggagagcttcaaacaaatccacagaggctgcaagtcgggccatagtccagttcctggagatcaatcagagtgaagaagccagtaggggctggatgctcctaacaacaattaacctgctggcatcctctggtcag

SEQ ID NO: 890 - protein, 146 aa, Mus musculus
NSSVFHPPAKMNMVKRIMGRPRQEECSPQDNALGLMHLRRLFTELCHPPRHMTQKEQEEKLYMMLPVFNRVFGNAPPNTMTEKFSDLLQFTTQVSRLMVTEIRRRNKSTEAASRAIVQFLEINQSEEASRGWMLLTTINLLASSGQ

SEQ ID NO: 891 - DNA, 104198 bp, Mus musculus
  misc_feature (1)...(104198): n = A, C, G or T/U
agaaattaaacgtaaaggaaaaataacctttaaaagtgtttttaaaaagaaaaagaaagggctggagagatggctcagccgctaagtgcacttactgctcttccagaggtcctgagttcaaatcccagcaagcacatggtggctcacaaccatctgtaatgggatcaggtgccctcttctaatgtgtctaaagacagctaccttgtacttacataataataaatctttaaaaaaaaaaaaagaaagaaagagagaaaagaaaaacaaaaccaaaaacatctgtttacagccttttgataacggcaactcctctttgaggggtccacacccatgctcatgggtgtggttcctgtcttggtgcctttctttctattaaaagaaaagattattttattttattatttttaaaaaatacttttatttatgtttatgcatctgtgagagtgaatggcacgttttggtgggtgcctaccgaggtcaggagaaggtatcagatcccctggagttggagttaataggcagttgtgaactgctcagtgcagatgctgggactgaactggttctctacaagagcagcaagcactcttacctaaggagccgtctctcaagccttctgtttctattttgttccgttttgctgagactggatagctctggctggcctggaacttcctatgcagaccaggtggcctcaggctcacagagatctgcccatctctgcttcatgagtgctgggatgaaaggctcttggcctcctagtctctctggtcactgtctgtgtgcctaaccttccacacatgcattaggtagatcttttgtttctagatgattcttcctatcattggctcttgagtgcttgttctatgatgtaagctatactgaagactaaacaagggcctcatgcatgccaggcaaggctctgtctgcactgagtcacatccgcagagggatgtgtcctcttgactaatttaccaggctggcccaatgcctagccatgacgattagtgatacagtgatataccctgcttccttggtttttggtttttgtgtgtttgttttgttttttgtttttgtttttgttttcccctcaggatttctctgtgtagccctgactgtttcaagacttgctctacataccaggctagtctcgaactccaagatccatctgcctctgcctcctgtgtgctggaatcaaaggtgtgcactaccacacctgactacataagttgttcaaagggatcctaagaggactctccactttttttttctgtaaggagattatacaggctgataaggccacaaaggtcaaagaaactcttgctatactgagccatatggaggttaaacactttttattattctctgactgtattattctctattcatatatatatatatatatatatatatatatatatgaaaatatatacactgtattattctctatttcatatatgtatatactgtatttttgtcattgcaccccattacttcctcatcactctgcctcttgcactggaccccttcttctttcccaagtgcccatcctaatgtcacatctttcatttgtgacccactaggtttattagagatgcttgaatgtacacgggaaagtttttttgctggtgcacaggcaacttgaaagtggctacactactgaagaaaatgagttgaggtgctgttgaagagatggtcacagatgctccctatgaaacacaagcacccaggtgaatgctgtggcatggtagtgaactcactgtgggaaacagacgagagcttcactggggcttgctgcccatgtgtgccaactgtaagacactctcaggagttggttttctcctactaccttatgggttctagggatcaaactcaggtaagtaggcttatttggcaagagcctgtctctactgtgtcatcttgccagccaaagacccaatttcaaaaaaaattttcccctatctttttatcctacctcagaatcagtactgaacacattcattagcatgaggctggatcttgggatttttggcgtgagcaggcatgtttaagatttcatatcaggataaagttcataaagctgttgtcagtgaagggcacaagggcagcagctagccaggctcaagctgacacagaaccatcaaattcagggagagatgctgtgggactcaaactggtggtcgagagctggtaactgtttgaggattgttgggtctataacctaacaggacagggccccaaattcagagatcaaatgaactgtgtaggtcattggaaattcaattctaaaacagagaccagaacaaagtctagttatgacaataggtgtagtggcacatacctttaaccctagtactgagtggcgattctctgtgagtttaaagccagcctgctctacacagcaagttctaggccagccagggctacaaagtaagtcccagtctcaaaaaaaaaaaaaaccaacaaaacccaaccctattagaatagaggttcatgggggcaattgacatttagaacttcatcaagatgagaccagaggaaggatggcttgaccctaggtcacagactggaactatgagttgaaaatagttcccaggagcgagaagttggataacttacctaagtttatgttgtgaaggtgggcctttagaattctatcaagaatttttcttttcttttttaaagatttatttatttaattatttatttatttttgtataagagtacacactgtagctgtatagatagttgtgagtcttcatctggttgttgggaattgaatttaggacctctacttgctcacgtcaaccctgcttgctctggctcgctcctgtcaactctgctttctctggtcgctccggttggcccgctcgctctggcccaaagatttatttattattataactaagtacactgtagctgtcttcagacacaccagaagagggtgtcagatctcattacggatggttgtgagccaccatgtggttgctgggatttgaactcaggatcttcggaagatcagtcagtgctcttacccacttagccatctcaccagccccctcaagaatttttcttggggccgggcggtggtggtgatacaaaacaaaacaaaacaatactggacataggcaaacctgtataaagcattttcttaaagtagtgattgatgggggagggcccagcccattgtgggtggggccatccctgggctggtagtcctgggtgttacaagaaagcgggctgagcaagtcatgagaagcaagccagtaagcagaacttcttcatggatggcctctgcagctgctcctgcctccaggtcttggctttcctcggtgaactatgattcaggaagtgtaaaccaaacaaaccctttcctcctcaggctgcttttgatcatggtgctgcctcccagcaaaatagctctaagacaactttgttgagggtctcctgtctgatgctgctgttttctcaatataaggctagcaagcctatggtctccacctcccattttactgtagggctgctgggattacaatgtgtaccactgaatctggtttttgtttgtttgagacagggtttctgggtgtagtcctggaacttgctctgtagaccaggctgtcctctaattcacagagatctgactgcctctgcctccccatgctgggattaaaggcgtgcgccaccaccacccagccacttgtttgttttttcacgtgggctcctgggctagaacacagcctgtcaggtttgcatggctagcattttgcctgccatgttgacctgatgcatgtatgtgtttatttctatatccaatatgcctttttatggaaaaattttaagtcctacctcttatttcaatctacatcctcatgatcaaattatagcatatttcatatacttaatttttcttggggtgtaaattcacttaccatcttgaattatgaatgctctacattatgttgaccaaagaggtaaatacaagtcacacagcttatagaaataacttatttgtaattgtattaattgtggaatttcaggtaaagattacctctctctctgtctcattcatttcctactccctcattgttagcaatcaaaaccaggggtttgtacactatatcactgagctgcaaccacagcccttgggttctcttctaatggactccttactccacagcctaattcccctccccaccttctttacctttctttgccttcttgctttcccattctgaagtttccaagaagctcctattggagtctaccatcccaaatcacttccatgactttaacccagaagtcatgacttcaaagtcagacgccaaaggaatcagacagtaaaggtaaataaacattggggggtggtgccgagaaagattgggcaaaatggcaggccgagcccagacactccacaaaggtggctgagccagctggcttatgaattaaaggcgtgaccatactccccctactttctcaaatatagctgaggacggccttgaattcccgatcttttgttcctggtgcctcacttccccagtgttgggattttaggtttgtgtctccacaccaggctcttgtaatcatgcactctgaccttgagtctcttccattgtccctgcaggttgaaacctatccagagagagaccagccggagccaggctctcctccctgctttctctccagatgattctctttccccgtgacccagaaccctcagaaccacacagacttcttccagctcttccatcccaaggctcactgatgtggtacttgccagttactgacccttctgcctttttggcatccttgacctccccgtgcccaccctgtctcttcactcatcttaagtcccctggtgaatcaaacccactctcttgctcacatcctcttttccttactgccctctctttactcttatttattcccttgtaaattttggtgatggggaagtctcagcttattctgaacctgtacccttggttgctgattgtgttagagaaaataacatgatcgcatcaactcatcccacttaaactcacgagctctgggcagcgggcatactccgaaagctcagatttttttctagcccactcatcttcccatccagacgactactttacaccttctcttctccttcttcaaacttccactaacctttcccacttctcagtttggaaacactacctcctacgcctctaacagaactgaaacgtcaggagtcccaaaggttcccaccaccacctctacccaactgcacgcctagatacagtgtctgttcccacatagagaccaccagaactagattccaagacaaaacctctccaggatactactccagcaagactcagaataagtctcttactctgtactttttttctaatttttgtgtcatatgcatcaaaatatatctctgcaatttttcaaattttttagaaattagttttctgaaacattcacaaatgtatataatgcatactgaccaatcttacccccactacctcctatcttcctgttacctatttatatccctttctccttcaaatctctccctgctcccttctctttcaacacagggtttttctgtgtagtcctggctatcctggaactcactctgtagaccaggctaccctggaactcaagagatctgcctgtctctgctcccaagtgctggaattaaagacatgcatcaccatacttcactaagattctataattcttaaaaagcttgctgggggttgaggagatgactcagaggttaagagcactgactgctcttccagaggtcctgagttcaattcccagcaaccacatggtggctcacaaccacctgtagtgggatctgatgccctcttctggtgtgtctgaagagagtgacagtgtacttgcatacatagatgaattaatcttttctttttatagcttgcttggcataaaacatagtttatgtaagactttctcaacccacaggtctgcttttatctctcatctcctctggcccttcctcctcaggtacctgctgctgaagaacaacctgctggtccaggccactcgcctactgagtttaaccagagctgtgtgattataggtttggagcttagtgggttactgaagacaatgtctgtctctctctctctctctgagtttatcaacagtcaatagctcagcagcagtaagggctcaggagtgccttctccatgtatggctgatttttttcaaggctggtcttgtgttagcagttgttgtaaattaatgattgcaacagttgtgctgagtctagaggatggcattttgcatccctccacaccatcttccagttctcacacactttctgctcctcttctgagacgtttcctgacatctagaaaaggtcctgttacatgttttgtttagggctgagcacttgctcatggctggttagtctcagtatcttgtgcagccacgatctctgcattcacgcattcactgtcgctgaaggtacacagtgacctaaatctctttctgattcaatgattattgctccaatatggggctccagctttttaggaaaacatctcaaaaaaggtctgtgttagccatcttcaacctccctcctaccattgttttctttctttcccttctcctccctctctgcttcccctctctcctcctctgttttctttttctctacttcctcatcccttttcttctgccccctcctttccctcttccttttagaggcaggactcatgtacatgaggctgatctcagattcactatgacattgagaatggacttgaacttcatacttccacatctacatagtgagaccttaagtgtattgggtaatgggtaagttttggatccatgcagtttaatgtggtgctgggagtcaaacctaggtctctgtacatgctaggcaagcattctaactgagccacacccccacttcttcaaatgtttccttccttctcattgttttctttaaaaaaaaaactttatttttattttatctgtatgactgcgcacacacgtacacacacacaccccacatgcacacacacacacacacacatgcacacacacactcacacacacacgcacacatactcatacacaggcatatacacacactcacacacacacgcacacacacacagaggcacacatatgcacacacacactcacacacatacactcatgcacacacacacacacatgcacccgcacactcatactcacacactcacacacatacactcacgaacacaggcacacacacactcacacactcttgcatgcctggcgccctcaaagaccagagacagcactggatctcctggaactggacctggattacagatggttagggagccgctatgcaggtgctgacagagttctctaacacagtgaatccagtggtcaattccttactatggcattcactcctcgttgatacactagcttaatttggctcttgggctaccttattccttaactggctgctcctgagaccctgttccttgctcgcctcccttgatttgcactatacccagggcttcatccttgatttacacctctatttacacctccccctctacaaatgcatgtagtttgtaaaacctggcttcaatgccatctgaaaatgccgataacacctgtgtatctctaacgtgcaatattttcctttatcccatactctcgtgtacacaatcacctactcaagattgccatgagagctggatgtggtggtacagagttgcaatcccagcacttgggagtagaggcaggatgattgtgagttcaaggccagcctggcctatatgcatccttgatttaaaaaaactgaaaccccaaacccagacaccacttgaattccaaatacatacttaaatgtaacatgagcaaataaactcttgatctcctagccaactgtctgtagttttctctacctctcactaccccattaccttgaagcactggctggcatgaaactagctatataaaccaggcaggtcttgaactcacacatatctgcttgctactacctcacctggccttgaccagttttgttttattttattttattttattttattttattttattttattttattttattttgagatagggtttccaaattgtgcaggtgagctgggctgaggctgtccttgaattcctgatctgtttacacctcccaagtactatgactgtgggcatgtcaccacaactggctcttaccagacttctctatagtcattgtgtttattatttattgcctgtcttctcatctccaaaatgtaatatccataaagttaggaattctgcctgctttgtctttttgtgtacatagcaaaaaaatttgaacagtgtctggatgctaagaaaatacttattgcagagctggagagattgctccgtggttaagagggcttctggctgttccagagaactcgagtttggttcccagcacccaagttgggcagcttaaaaccaactgaaattccagccccaggtgttctgatgccctcttttggcttttataagcaatcacacaaatatggcagacatacacatataaataataaaatcttaaaaaaaaaaaaaaagggctggtgagatggctcagcaggtaagagcacccgactgctcttccgaaggtccggagttcaaatctgagcaaccacatggtggctcacaaccatccgtaacgagatctgactccctcttctgaagtgtctgaagacagctacagtgtacttacatataataagtaataaataaatctttaaaaaaacaaaaaacaaaaaaacaactaaaggaaaccggtaggatccgtcctttcctccttcttccttccctccctttgtctgtctttgtcttaagtagctccggttggccaagtgctggaattacaggcatgagtcaccatgcccagctcatatttacttttactttagaaattactgaagtcatttaattaaaagtgaaagtcagtggctcatgcacttctttgcgagtaacaaaatattatccaggttaaagacctgtctccagaaactgaaagcactagaaacataaagtacggcatagcaagggaaaaaaatgaagtaggacctgcatctccctgcattgaagtcactcagatcaatagctgtactcctcccagggtggccccttctcccttatttggccatcagtgtcaacagaagaaagcaacgccttgaggtgtatagccttaactgagctgctctgctatatcctagaaggtctcctgccttcactgtatttatccggcatttatttatttaattatgtatttaacgtgtgaatcatgattctgtggtagaggcaagaaaactctgaggctgttttgcaaacaatgcaaacttcaaaaagtcgaaatggtaaaaaagaaagaaaaagaaataaaagaaaaaaattgcattaaatttaaggtacgcaaagaggcgaagtgtctggaaggccacgcagaactgagcgggaaggagtcccttcctcccctagatagcggtggtcgcgtctccggagagcctcctttccctggagaggatctatgagttagttggtcgcctaggatgcagctctaagcatccacagaatttccgtgcaatccgctcgcacaggtccagagcgcggacggcgggactccgcgcgtgaagccgcaagcctcacagtgaagtgggcgctccacggagcccacgttttgcgcacccccgtgctgctcgcacccgcctcggccgtacccctcccccgtccgcgcctcccctttaagcacggaggcgcaggcggatttgtgtcggcggacgcgaggctcgactcccctttatggcggagccccgcgcccgcgccttgacgaccgccgcggctggcggtgggggtggggttctgcgcgcggagccggcctccgctacccgccgccctcgccgcagcgcggccccggggagcgcgcgccgggggcgggccgtgggcgggccggcggggcaggggcggggaggccggcgggcggccgcgctcgggtccgcctccgactgcggcgcggcggggcgatgtgagtgccatggcgaggagtctctgcgcgggggcctggctgaggaaaccccattacctccaggtaggccggccgcggccccgccacgcgccctccgctccgcgccacgcgggactcagcgccccgtcctccctccgtgcgcgccccgccgcctcctgcggaccggcacctggcggcgcgccctcccagccctggtcccgctcctcgggcgccgccccagccctgagcccctctgagtcccggccccggacgcgccgcggtccctcctctgcgtgctctcccgctttccccaagggccccccctcgacctgccattcctgactctgtgtctggggtaggaaagggtggtgtgtcattcctccatgctccacagaatcgtgaccgattgtcataccagtggttccccaagtcccagccagtagctgtgcctcgtgcagatcccctgggtttggtgttctcatcacatctctggtttaaatgggagggaggagtaggcaagctcgatcgaggcgatgcttttgcaaaaaggggatggtgaccgttgtacggctcttcactcagcccgccagcagtgcgaacgcaattcacagtcacgtcgtgtgtactgttgccgtgttaatttttcatgattttctgttccgctgtcagtaggctttagaaccctcctgctgctttggtgcactgtttggtcaccagggggacctagtagacgtcgtgagtagctgagcacaaatccatagctcggatggaaaaacaactacaaatcaatgcctcacacattggcagtattgttatatgtctctagaggacactgcttacattaaaaggcctgacgacatgggacgtgtatttaggtcagttgttggtgtgcttcttatgagtatggaaaaaaaagaaaaagttgaggagaaaccgttactgtccaaataaatcttatattttaatttgaaatttgcaagtgtaagtcattacatcgaaacgagagaaacccagattgagagactgacttgacaactcatggttttaagggtgtaaaactgaatgtttgtagcagcgccaccagaaatagttgtgccttgagtaccagtattagaacctagtctagcattccacccctccaggttaaagtatttgggcatgtttaaaatctttgaacttaaactacttagctttctattattaatttttggagttggtagagctttaggctttagttttggctttaaatgttttccacagatgtgaatgcaatctttggcgctataactgtacaaaggttttctgatgtggttaaggttagaaattaagagttctggattcaatccccaacaccacgcaaacaaaattagttttacaaatagttatgcttacattaatgacaaacacttagtgtgtttcttacttttctgaatttgcatcgttatcaatgatgaaattagggtaagcttgctagtgggctaatattaagattattaatttttaaaaatgtttaaactatttaaataccagcacttgggaatcaggcctctgagtttgaggccagcatagtctacataacaagttcgagattagtgacgactacatagagaaattttgtctcaaaaaaatttaaaggtaaacttaagatttaaaggacaagttctcatgtgacacagattgacttagaactctcgaggtagctaaggataaccttgaatttctgatcctcttgcttttaagagcttgtgattgcaagggtatgaatgaatggcacagttgagagtccagtgttttccccaggagcttcctcccatcgaaatctccaaataggccagggagtcccaggaatccccctgtctccacttagtcaggtctgagattgcaaggatgtgcaaatctggacgccaagtgcttggagagcaagacctttacagactgagctaactctgtagccgcctcctcttcctcttcctcctcctcctccccctcctcctcttcctcctcctcctcctccttcttcttcttcatagatcatgcttagcattaacttagtattagctaaatttgatttgtcatggagagggtttcttgtgcactgtcttttggcaaaagaaaataaaaaaactttaacagcctgtgtatgttagaacacacacacacacacacacacacacacacacacacacacactttttgagaccaagtcccagtcttgcacaggctggccttgaattcccaatcttcctgtttctgatcttcctgtttctacctccctagtgcagggtttacaagtgtgcccagtatacagtgcttcagggaaactagttcttacactttgttttgagggaatacagatacccgttttgagggggttttgtttttacttttgtgttcttttgagataaggtcttgctatgtattgtgctggctggcttgtactggatatgtatataggttaacctcagactcatggtggaccctctgtcatagcctctcaagtgctgggataacaggcatgcccagccacacctgcagatacctgatgtcaataatatttctgataaggtacatttgtgttgttggtttttcgtgacagggtttttctgtagctctggctgtcctggaactcactttgtagaccaggctggcattgaactcagaagtccacctgcttctgcctcccaagtgctgggactaaagcacgcgtcacctcgccctccaggtacattttaagttacagtgaggctgtaaccattcaacaggtatgggagatgctcttaccttgtgggtagggaaacagcaaggtagatttatttccaagaggaggggaagataaatggcctggaaagtttttgaaaccagttttatatccttggcagttgttcttgtttgtctcaactgggtggggccaaaggtcacttatgtccttatttagcccttagagagtttaagtttctttttccctattttttccttagtatttttttctctaaatttttttcatacaatatattttgatcatattcccaccccacccccagcttctctcgacctctctgtccacccaacttaacgttctctctctttcaaaaagccctcacaaaaacaaagattaaaacaaacaaaaataagacaaaaaagccaaaacaaactaaacaagcaaaacaaaatgaagacattttttattttatgtgtatgaatgttttgcctgcctgtgtatgtgtgacatgtttatgtgcatgctgcctgtggcggataggagagcacaccatatccactgaaactggagttaacatgtggttgtgagccactatgaggatgctgggaactgaacctgggtctttttttcaagagcagtgagtccttataacccaggagctatgtctaccccctcccccataatttagagggggaaacttaataatttgacttgcttgtcaaggacctttcctcacagaattcccatcaacccagatgtcactggtagttactgcnnnnnnnnnnnnnnnnnnnnnnnnnnnnnnnnnnnnnnnnnnnnnnnnnnnnnnnnnnnnnnnnnnnnnnnnnnnnnnnnnnnnnnnnnnnnnnnnnnnnnnnnnnnnnnnnnnnnnnnnnnnnnnnnnnnnnnnnnnnnnnnnnnnnnnnnnnnnnnnnnnnnnnnnnnnnnnnnnnnnnnnnnnnnnnnnnnnnnnnnnnnnnnnnnnnnnnnnnnnnnnnnnnnnnnnnnnnnnnnnnnnnnnnnnnnnnnnnnnnnnnnnnnnnnnnnnnnnnnnnnnnnnnnnnnnnnnnnnnnnnnnnnnnnnnnnnnnnnnnnnnnnnnnnnnnnnnnnnnnnnnnnnnnnnnnnnnnnnnnnnnnnnnnnnnnnnnnnnnnnnnnnnnnnnnnnnnnnnnnnnnnnnnnnnnnnntaactgggcacacacctttaattcagcactctggagggagaagctgttggatctctgtgagttcaaggccagcctggtctacaaagagagttccaggacagtcagagtgacacagagaagccctgtttggaaaaacaaaacaaaacaaaacaacaacaacaacaacaaaacccagaacaaacaaaataccagtaagtctcctctcctccccaccaaaacttagtattttgtaattaatgtaactataacctataactgggatttgtgagtacctaaccgctatggttaccttatatactggctagttttgtgtcaacttaacacaagctggagttatcacagagaaaggagcttcagttggggaaatgcctccatgagatccagctgcaaggcattttctcaattagtgatcaagcagggaggtccccttgtgggtggtgccatctctgggctggtagtcttggttctgtaagagagcaggctgagcaagccaggggaagcaagccagtaaggaacatccctccatggcctctgcatcagctcctgcctcctgacctgcttgagttccagtcctgccttccttgatgaacagcagtatggaagtgtaagctgaataaaccctttcctcccccaacttgcttcttggtcatgatgtttgtgcaggaatagaaaccctgactaagacaccttagttgatataaccaagagattctactgcttgtgaagaaaagaacttaggtgtggtatccatatagtaaaatacaatttagcagtaaagactgaaatagattagttacttagagttgggtgggaagaaagagtggttactaatgggtagattttgagaggaaggggatgaggagaagtgcttgcatgactgcatattacctaacaatctacttaaaggcatgtgttctctagtacatggactacatatagttcagtaaagcagcaaggagtgagggaagcagaaagggaagtgatgagttgagctgactctatgggcatagaccttgttttcccccacccctcttatagctctcaccaatgccagctctttggtgtagggaattcttgcttccagggcagcaatgcaagcacagtgtgcaacctctctaaataagttagccaagctgcatgtacctgagtaccagttttcccatatcaaggcatcattctcagagaaagctaatgtatgccaatatcctttgccactgttttgttgaaaaataaccctggaaataacactctttggatgtgccaaatgttgtagcatagtgaaccgagttaaactcttgacttggctcattgctctgtcaaccagcttaaataaacaactcttaattacagttagagcaggagtgtctcaggactctgcatcgaacctgcagtgttttttaatagtgtgttatctacaaattaggatccgcttttgtttggggtttactacaattgagggagggtgacagatgacacactagccctgtaatttgttggctttagtgtaaaatacctgctttcttctatcattaaaccctggaagaatgaaagttaagacagtttgtggtaatttcatatgcttagattatacacattctccattccagccattctgatcatactgtgcaacatagaaaaagattgtacaattataatgaaatttgaggactaagctatcttcctttgaaggttttcaagcctttttaggcagatccacccccccccccccagggcttctctgtgacgccttggctgtcctgcagctttcgctgtagactagactgacctcacagagatctgcctgcctctgcctcccagtactgggattaaaggcgtgcaccatcaccacaacccagtggtagcagttttaaattttgggatgttctgtccaaaataagtgctctggcatttttaatatctgttcagtcagggctgtcatgaatgaatggataaacatttttgttcttaactctttgagagagtccccctatgtagccttgactggtctggaactctccatatgtatcagggtagccttgaacttgtggcagccctcctgcttctgggattacaggtatataccatcacatctatcaatggcctgctttagactttggaacctactcaacattagactgttggaacttattaaacatttcttttgttgtttgtattttgagatagaactgtattttggctgttcttggcctttcttccctcagttcccaagtgctggtattataagcatggcacctattatttaaaatttctaatacctggaattttgacttctattagtaccattttccaaacagtttggtttttgtgtgttttaatatggatattttgtagaatttagtgctagggagagtttttgacatatcagtggtagctgttacaatgtagacaaatgctagagtaaaagtaagatggtctctgaatgttggagtaggtggttctgtattcctaaaaggtggcagagggaaaaacccatgtcttgacctttgcctgaaaagaaatctctcgagctataattagctctctgaagttgtgagtgtacagagaatgtgcatgactgatactgctttacatttaagtgtacgcctgcagtcccaggatttaggaggccaaggaagattgagaattgtaacctatcctgggctacctggtgtaacattgtctcaaaaaaaagaaaggaagaaagaaagaaagaaagaaagaaagaaagaaagaaaggaagaaaggaagaaagaaaggaacaagtgaatcaaaaagaaaatttaaacatagaagtagtgtgtagctacattatcatgcttcttgagaaccataaatgattaattttgtagcaatttttccaaacttacagacttgaaaactgcttttatgtgcatgggtattttgtgaatggtacctgtagaggccagaagagagcattggatctcctgaaactggagttacaaatggttgttagctaccaattgggtactgggaatttaatttggatcttctaaaaaagcagtcatattcttaactgctgagccatctttctagccttcatagtaccctttttgttgtttgtttgtttgtttttttatataggatctcgatatttagctcgggctgtttgaaactcactatgtagactgatcgtgaatttacagagatctccctgtctctgcctctggtgctgggattaaaggcatatgccaccacattcaacaacttaaatatttttaagtgtactctatgcactttgagtgtatcagacctataaaactttttcatcttgcaaagttgaaactccacccattgaaattctccctgtttccttctagtctctgaccccaccctagtccttggtaaccacatcctattttctgtttctattagtttgactctcttaaaatatcttgtgtaaatagaaccctgcagtatttcccacccgttacctcctctcctgtcctcccttcctctccttttctctttctcctccagttcctatcctccacttctttcctcctcttctctcccttctcctccttcctcttcccctctctcctttcttgaaaaacaaaacaaacaaaaatattaatagcacccccccatgtttactccctctctcaagacagggtttcttcactgtgtagctgtggctatcctggagctcagtctgtagaccagactgtcctcgaactcagaggtctgcctgcctctgcctccaagtgctgggactaactatgttcattaccaccatccagcttaatgcctttttgtgttattagaataactagtattttagttagtatgtagagtaataggttcattgtgacattttcatctttgtcatgtgtattattgtgctttgttcatatccttgcctccatcacccatgtctcctctctcctcattttccttttctgcctcttttttttttttttttttttttttttttttttttttggttttttgagacagggtttctctgtgtagccccggctgtcctggaactcactttgtagaccaggctggcctcgaactcagaaatccgcctgcctctgcctcccaactgctgggattaaaggcgtgtgccaccacgcccggctccttttctgcctcttaaatagtggtatgtgtttctataatctgaaaatgagaaaaaaatgtgcaatacttgatctttcctcttttgttcccctctccttccttctaaccccttccttccttttaattatattcacatctcatgtatatttaaatatttaaatctagatctacatatagagagaatgcttagtgcttatcttcctggtttcttagtaaatcttcatactattcttcatagtggttatactttttcctccacattcctgccagtggtgtgcaaggactccagttctttcatactctatttagcttttgctgttttctgtttctggattgtcatctatcttgaatctcttccccatttcttctagggttcatctctaattataggagaaagtgatgtgaccagattctgaagagtgcatttgctaaataacacatgaatgcactgtagccttctgttctgctggcctagcagaacagcctgctctaccggtacagaagcaccctcccatcttgttctagcaacatcttccccaaggggcaaatctggctgggcctccctcctttgtacttgtccttcagtggactcgctttttccctcctagtggccttcctttacctcaggagacctggttctgtggagaacatggccctttgttccagcagacctgagaaacttgacttttccaaacatactagcatgctactcagtcttcgtgtctactcagtcctttcctctttgctttaagttagttttaatttttctcttgtagtgctgtggattgcagcaggagcatgtgcatgctagacaagtgctctgccccttaaccgcttccccagttctagtgttcctcttcgtcctgtagagcgcttcctctgccaagtctttatatctgcttacctggtttattctctcttatcttttaagtctcaactcaaagaggaagtaacctttgaacatccctctctaagacctacagactctaagcaaatgatagccagtatctcttacaagatactgaagcatcttgggctttttcctatcttttctcaaaggtgtgagctgcttgagagctgaaatgtccatttcctctctgtctgctttgtctggctcagggtaggtggccaataaatgtttgtggggtacagtgaatgtgcttaaacatttatagagatacggaggggtttttctggggaaatgggccaggagtgtttgctgtatgtatacccagctgttgttgctgagatcacacaggcacccccacagctggttcatggtatagagtcttgtggaactgattagatacattaatcccttatgtgaaagaatgtgtacacagtaagtaaaagcacacagctggtcatatcctacaagccttaattgcctcttgccacttctatctgatctgctttactcccaaagcctgtctggtagctatacttctaactgctaattgcgtctgttgctgtgaagagataccatgaccacagcaaatcttataaaggaaaacttttaattggctcattatcatcatggcaggaagcatggaggcacacaggcagacatgaagctggagagatagctgagagttctacatctagatcagcaaacaacaggaagagagggagagagacagtgggtctggcttgagcatttggaacctgaacgcctaccccagggacatacttcctttaaaaaggctacacctactccaacaaccccatacctcctagtaatgctgtttcctatgagcttgtgggggccatttatattcaaaccaccatgctggcctttgactcccggagtttcacctgagtcctccatggtcatataaacaatacacttggctttaacttttcaatacatttttattcagatatagttgtgtgtatatgtgtgtgtgattgcatatgtgctatagcatacacatgaagggccagctgttgcaggagttgttttttttcttccactttttccatgaagtaaacatgagacctatagactgaagcttgtagttaccacctgaggtagcagaccttagcagttcctctgttattaagcacactagtaggagaatttttcccttcccagagaataccacatatttgccacctggaaagaaaatgtgacatttgcaaattgcctaggtttggttgctttttgacatatatgttagagaagaatggctagctctaataaaatgcaagttatgtttgagagcattacgaactttcttccgtgagtttcttgctgaatgattgcctatgctcagctgtcgatgcagtttttcccagttatctgctcctcaagtccatgtgacctgagcgagttgaagagcatcgagccactcaaataatgaaaaggacgctcacctccagagaaagaggaaagaaaggtggaagtgggtgttgatattgtgtgtcttaaaaaggcaaagctgccaggcggtggtggcacacgcctttaatcccagcacttgggaggcagaggcaggcagatttctgagttcaaggccagcctggtctacaaagtgagttccaggacagccagcagggctatacagagaaaccctgactcaaaaaaacaaaacaaaaacaaaacaaagcaacaacaaaaaaaggcaaagttgatggtcctagcatcctgcaatttatgtcttgagacccaacagaatcattgtttgttgtggcccaagataaaagaaatctttaattttagtattccctaaaatgcgattccataaatagtattcagtgcagacctagtttgtatgctaagattacattttttttttctctctctagggttaagataatgacccttgggctcccaggcttccaacattaataacgactggatacttttcttatatactataagttctttataatcaggcactggctgtcctgttgtaatgtgtttccttttggggggggggtggnnnnnnnnnnnnnnnnnnnnnnnnnnnnnnnnnnnnnnnnnnnnnnnnnnnnnnnnnnnnnnnnnnnnnnnnnnnnnnnnnnnnnnnnnnnnnnnnnnnnnnnnnnnnnnnnnnnnnnnnnnnnnnnnnnnnnnnnnnnnnnnnnnnnnnnnnnnnnnnnnnnnnnnnnnnnnntgtgcgccaccacgcccggcttttttttttttttttttttttctttttaaaaacaaacaagcatacaaggtattactttgttagctcagtctggtctgaaactcatgaatgtagcccaggctagtctcaaattccttcctcagcctcctgagtgagattaaaggacagcaccaccatatctgacttttctttaattaaaaacaaatgccttgccctgtgctgtaggccacactctgcccagctcactctttcagtgaacttagtaagtataatttttttctaggtgttttctttttctttctttcttttttgttttcttaaagatttatttattttactttatgtatatgagtgtactgtagatggttgtgagccatcatgtggtagctgggcattgaattcaggccccactctggcccaaagattttatttattattatatctaagtacactgtagctgtcttcagacacaccagaagtgggtgtcagatctcattacaggtggttgtgagccaccatgtggttgtgggatttgaactcaggacctttggaagagcagcccgtgcttttttttttttttttttttaaagatttatttatttaattatatgttaagtacactgcagctgtcttcagacactttttttttccttctcgctctggccccattgccttgctgtagctgtcttcagacatcccagaagagggtatcagatctcattatagatggttgtgagccatcatgtggttgctgggatttgaactcacgacctttggaagagcagtcggggctcttaaccgctgagccatctctccagcccttctaggtgttttctaatagacttgatttttttttttcctggcacaacctgcctttgtcatagtgccattttcttttctgtactcttggctatattttatgttttgaatcccccacttttaaaaattagaaccaatacccctccactctctagaccccatggattttctgggcttgcaacacctcatcttcttgggattcctttttccctctgggttggactcacagttttcaggatcctgagttttcgtctatcctggtctatgttttcatcttactagggcggtaatcctgaaatgagctctaaaggaagcatgtgagggaagtgaaccttctgcgtgctttcatgtctaaaacggaatttcttatattctacctcctatttattattgagttgggtgtagaatttggagccaaaagtaatttttttttcctgaaaaattgaaaacatggatccctgtcttggccaaggggccagtttgagtctcagccctttgtatgtgatctctttctcttcttctttctcttcctcttcttctctctcttttctcttctcttctcttctcttcttttctttcttttttttttttaatacttgttttgaaattccctgaggattggtacagggtctatatcagttgtattgggctctacctgagcccttcggatagtttttgtttgtttttctgagataggtcttaccttatagctttggctgacctagaacatatatcaggctggcctagaactcacagggatttgtctacttctgcctcccaagtactgggattgaaggcatgtgccaccatgcttattatccctttaggtagtaaaacttagaactttcctacttcagctccagggtatgctgacttctgtttcctctctctaggcctttgtcagatcacctgtctcttggattggttccttgtgtctcctgtactttattgtgaccatatttgtatcattttccataaattgtcaaaaaataacttggagggtgtcttagttagtgttttactgctgtgaacagacaccatgatcaaggaaagtcttataaaaacagcattttatcagggcttggcttacaggttcagaggttcagtccattatcgtcaaggtgagagcatggcagtatccaggcaggcatggcacaggagaagctgagagttctatgtcttcatccaaaggctgctagtggaagactgactcccaggcaactagggtgagggtcttaagcccacacccacagtgacatacccattccaaccaggtcacacctattccaacaaggccacaccttcagatggtgccactccctggtccaaggatatataaaccatcacagccacttaataagtttagtaggaaagtgtatgtagaaaattattagtgccagatctcattgacataataaagttacagccataaaatttgataacatttaataaaatattttcagtacaaatatgttatttgcttttatctaaaattcatagttttacctatatcaggcaccttataacttggctagtaatgtgtcatgtatgatttgacaggacagcatatgcccaattctcatgaaaacagacaggaaagagaggctatttaagagaaaacacatacacacacacacacacacacacacacacacacacacacacacagaagaggtagtttttactgggagggttttatagagacaggttgcagagagaacaagctagacacaggtgaaggcagaaccagtcagagaatgagaaggagccagaagattagaacagattgccagagttcttttgaggccaaccatgacggaggggaaagggttaaagaccactgtgagggaagccaggactggagtccaagggagaaacccaagggaagcactggggcaaacagcctggaggaacagcccttactgtgttgccctcctggcctgctcagcttccttcctccacagtccaggcccagctgcttaggggtgacactgcccacacaggctgcaccctcatgcatcagttagtgattaagaaaatgctccacaaatatgccccaagctaatttcatggaggcagttccacacctgaggctccctctttctcagtatgtcaaggtgacagccacgaacagcttcacaaaggttctcaagaaccccaggctggccttgaacttgccatatagctgatgaccatgaatcatttccttacattaaaattaaaataaaaagcttttgtatacacatacacacgcacgccactatattcaagtgaaggtcagaggatggttttcaggagttttccttctaccacaggttctaggggtcaactcgggtcgtcaggcttgcatggcgacgctagctatatccacagttaggctatgaacttcttatcttgcttctacatctggaatgctggctaatgagcctgtgtcagcatgtctggcttatgtgacacacttcatgcattctaggagtgctcgaccaactgagctacattctcagctcttactctttttttgtggaccttcctctttggtattttgactatagatgtcccctccctcgctccaccactcctttgccatgcctctgctgaggaccaaatgtaaggcttgctcggtaagtgttgtgctgctgactgttcacagctttcgtgggagctgtcaagaatgcttctttccccttcatctttgttcccttcagctgcttcttccctgtgtgttttcttagctcttctttttcacgcccctggatcccctgatgtacttgctgatctttggttgtctatttcataaaggactgggtaactggtgtggtcgattgttctgttttatcagtagcctcctgactggtgtggtagctggctgagtcccatctagagccagaatgtagtggctgttgctttgctctatggccttgggccccttgtgtcactggagtactttcctgtggtctacaggcactttctgcacctacacagacgctctggccatcttggattctccttttcttcagatatccagtttttcttttttcctccttcttgagttttggagagagttttcacactgcagcccagaatgacctggtattcacagtgtagcccaggctgatctcagcctcccagaaactctgcctgctgagtgctggagttacaggattgtattaccaggcccagccagaaatctggtttttgtttttggctgacctatgttgagtgggggaagcaatcaggctgccaggctgccaaccagaaggcctaggtactcctcctaaaatatcaccccaccctccccacccttacctacccagccccttcccaccctaaccccacccttagtctcactgtccatatccattgtctttcctgctggctcacaccgagcctaaagtccttaggtgtgctaaggggctaggttggctctctggattccttctggattccaaccggagttctggttccagcttatttaggttgtgtgatggaatgttcttttctgtgactttgtctaccttcctcctacctccatcagaattacatttgccttttgaattctaccaatttgttagcccttctatacactatggaatgtcccactttctctttaatgttagcagtttattgatccttttgcttatttggatacagtgtggcgtgacaagctgtgtaatagcaaacatgtgtcttcagtgtaacatcttgaagtcctgatataaattttgatcttcccgtgtttagtttagtgtgtttatttgttacagaattatcaagttattttattaaaataaggcaagagaatagagtaaccagtcttagagagacaaagatcagggaagcaaaagtgagaatggacagctgggattacatcaggttttgcagttttcctttttataaaaacaaaaacaaaaacaaaacctcatttttcagctcttcccttagatgggttccccttgcttgcactcttgtgttttgagatggagtctctagcccaggctaacctcaaacttataatgtatgaaggatgaccttgaacttccgatcctccggttccaacctctcaggtgccaggcttactggtggtgctgcaatacttggtttgtgtcactatgccaggtggctatattgtactagagatctaagataggccttccttcgagtctaacatcctaccacttgatctgtattctcagttttgctttgactgttttgtatgctttagacaagatctcactatgaatccttgccaggcctggccttgaactcacagaaatcttcctacctctatctctatctgctgggattagaggcctgtacgaccacacctgacaatcccaatctcactcttatcttcagagaatggagatgaagagtttactggaggtctttgaattccctgtgcttttcctgagagtctgtggtgagggtttaggctccccttcccctcccctctacactagtcaccttcccacttcagcaaaagaaagtcaagagatctaccaggatcttacagaggctccttgctgcattgaaagctctactggaacacaaaagggcaatagaacatattagtgtttgaggtggggtgatgattcagccaatagctgggccaccgaaggcctgactgagtacctttgtaaaggcaggagcagaaaactggccctaaagattcctagatttgataaagcctggtctataaaaagataaattggtaagttggtaagattttagcaaaattaacctcttttgctttgtagcagatcttgttaaaaggttgtgacacaaatctgtaatcccagttcatgtatactgaagcagacagatggaggttgaggccagctcaagaccttcttataaagtatatctgacaagggaatatgtgttatccatgatgtgtggtgtgtggtttgaatcagaatgtcctctataggatcatatatttgaaagcttagtccccagttgctggaattatttgggaatgattaagaggtacgaccacattggaagaggtctcactggaagtggttttgagttttcttttctttttatttattatatgtaagtacacggtagctgtcttcagacactccagaagagggcatcagataccattacaggtgattgtgagccaccatgtggttgttgggaattgaactctggacctctggaagaccagtcagtgttctttttttttttttttaatttatttattattacatgtaatatacactgtagctgtcttcagacacacctgaagaggacttcagatctcattacagatggttgtgagccaccatgtggttgctgggatttgaactcaggacctttggaagagcagtcagtgctcttacccactgagccatctctccagcccaggctttgagttttcaaaagcccatgccattccagttgagctggctctctgtttgcctccttcttgtggattagatgtacgttttcagctactgctcaagtgccatgcctgcctgctgctgttctccctaccatgacagtgatggattcattctctgaaactgtaagccctcaattaaaaatatttcataagttgcctttgtctcttcacagtgataggaaagtaaccaagacaaagactaaaatactgctctattggaacctgtgtaagatctcttgactttcttatgcaaaagtgggaagatagtgactgcacaggggaagggaagaagagcctaaaccagcatcacagacacaatagaaaagtacacagcgaggaacacggcagcaagcagccaagcctggccctggaacaggagctgagagcttacttctgatccacaggcatgcgggaaaggcaaagacagatagactgataggcacacagacacacaaacagagacagacaagcacacagagagacagagaaacagacagacatagacatgttgagaatggatctggtgtgggtttttgaaaactccaccacagtgacacatttagtccaacaaaaatcatacttcctagttcttcccaaacagtccaccaactagaaaccaaaaatttaaatatatgaccctacaggggccattcttattcaaaccatcacagccttaaaagttctaacatgctgtgtgtgtgtgtgtgtgtgtgtgtgtgtgtgtgtgtggtacatacctttagtcccaacattttggaggcagaggcaggcaggtagatctctgagttcaaagtcacctagtctacagagtgagttccaggaccactagggctatacagaaactgtctggtgaatgttgggggagctctatgtattatgtttccctctatttaaacaatgagatttcagttggccacaatgccacatacctatagtcccagcactcaggaggttgcactgtgtgaacacagctaaacttactcatcctactgttaataagggtgggttgttttcagttttaagctgttgaagttgcaaatattcttggttcttgtcttttgataaatatatatgaacgtgtgtgttgaaatggtttagctaggtcatagaataaatgtgtatgctttggttttaaagacaggaattatagtgtggctggccttgaactgctctgtaggcaaagatgccctcgaatattacctaagtctttttccagtgctgggattacaggcaggcactgctgtgttaagagaatttattagcatttatgaacctcttgtctacactttcaagtcaccaagacacaggtatcctgagatccacaaacctattcatggtttctgctgaagagctggccttagagagcacacgctgcacagggagctttctcctcaaccttcagtagcctgatagcagggccagtcggtgatggggagggtagcgcaggccggtttattgttgtttgttttgtttgtcaaatttgcccatgtctgttgactgacccgtgtccagtttttcaaaattgacagttgatgaaagctctggtcctcataccagctttccaaagtaacctgaataaagtaacttaaaaatttcgctgaggtgatccacgccacagcattacccgatcctcctgagtgcttctggtacttgtcagtgggagtggatttggctcctgtggaagtgaaatttctgggtcttcttcagtgtggaaggcatgccaatggctgagataaaagaacagtcttggggaaagagaaatgactcagcagctaagagcatttgctgctcaatcctgaggatcagtgtccagatcttgtatgagggggttcacaaagcccatgatgctggttccagatggtccagctctttcctggactccacagatatgtacacacacacacacacacacacacacacacacacacaccaacattagtgcatgcacattaataataaaactaaacatttttaagtggtgaggacatttaaaattctactttcaccagttttttgtttttgtttttcaaaacagggtttcttgtgtagccctggctgtcctggaactcactctgtagaccaggctggcctcaaactcagaaatccgcctgcctctgcctcccaagtgctggaattaaaggcatgtgccaccactgcccagctctttcacgagttttttactttttttttttttttgagacagggtttctctgtatagctctagctgctttcaccagtttttaagtgtacaacacattgtggattttaatgtatatttgttttgagacaggattttattataatcctcaaactggcagtcctctgccctagcctcctgagttctgtgattataggcagtcactgttattaactatgcatgttatacatgtatacatttatacaatgttatacaatagatctctcctacttactcctctcagccaactcaaatcttgtattctttgacctatctagatgaaactgtatcctctgagggacagtttccccttgtgttgtcttaataaatacttaaaatcagttctccaaaagattctgctatgttttgttttctcaaactcagagacttccttgctaatgtgggtcggggaaaaaaagacctcagtaaagatggagacacaaaaacatgaagtgtgaccaatccagatgctgtgcagagtatagacacatgctgaattttgcctgaggaagaaactgggcatcagacacaggactccccaggcttcataaatgccacaaacaacaaacagtgctgtagtccacttgtgttgctttaacagaacaccaagactgaagtatatttttaattactggatctattattacttactgaaatgtttggtttttttgttttttttaaatagctctgtagttatgggaagttcagaatcaaggaacctcacgttcactggtgaggcttggttccattgctgttgccacttcctgtaggcaacacaacgtcgggtctattagagaatcaatcttgttgtgtctgcctgcctgcctgcttgactgtctgtctgtctatctgtctctcatggatctcatgtagctctcaggctgacctccagaatgctgtgtaactgaggatataattggggttagggagatagctcagacagtaaaatgcttgctttgcaagcctgaagacccttatttgattcccgggacccatgtaaaaaggcatagtgatacacacttgtttttccagttctggagaggtagagacaggtagatttctgagtctccctcgccaaccaacatagtctagttagcaaattccaggtcaaacaagatagcctgtctcagataaagcaagggggatggcacctgaggaatagcattcaggttgacttttggcttcaccttacacaccctccctgaaaacatacacaatttaaaaaatatttttatatatgtatatttttaatttttaatcaaccttatatgtgtatgtgtatgcatgcaggcatggatgcctaaggaagccaggtcccttccccctgagcgtgagttacaggttgttgtgagctatctgacatgaactgccagagattttgaaagtaacaggaattccgtagcaattgctgagtcattcatgtctagaataagtttcagtcctggccccaagagaggtctaaagacatcttgagcctctttttctttcctgacttgctgtttggtctccaccaagacaggcacgtgggagtttcctttccacacactgaaagtcccttgagttaaatagaaattcagtttacaatcctctgtcaagtaacactaacaattatttctgctaagtgaccagttaacttgctgaaaggaatctggagtggtctacttgccttcatcactcagcttcaacagacagacccaaaggaacaaagatccccaaaatatggtttattctgagaaaaggatataaagaaaaataaataaaataaataaataaaggatataaagaaaaataaataaaataaaataaaataaatgtttattaaaaaaacactgtaggtctgacaagtgagctggaacttactgtcagttctggcctgtattttggctcacagggcaggataatcacatttactgttacattcccattactggtataccacacaatctcacatgacagttgtagaaagagcttaaagcctggcagtggtggcgcacgcctttaatcccagcactcgggaggcagaggcaggtggatttctgagttcgaggccagcctggtctacaaagtgagttccaggacagccagggctacagagaaaccctgtctcgaaaaaccaaaggaaaaaaaaaaggccctttggagtaactcttatctgtgttgtcaggaaatcagcagttcagttcacaggactcagcagcccagctgcagcttgatcacaggcactttatggctatattagcagtccagttcggtggggctggggtagcagcagtggcattacctagcagagacagccaggcctcagcctaggcacaagtcagcaggagggatgaggagggaggcctggagagaagttctcggctgtgcctttctcagtgaagcaaagatcagcgcgttgcatagctggctctataccagctctataagctctataagctggctctataagcaagcctcccccagcctctgggttctgccagtctcttagtgagtgatctcttgggttagcccttgtgaagctgatttgcctttttttttttgaagtcagtaactgaggcagtctgtgatccctttggcctatttgctttgtgaagacatccacgtctcagcaaataagaggttttcctaaccagatctaatctttatgttttgttggtaaccatattattttcatttcctgtagctatataagcataactacatccccatcttaaaactattgcaaatttccattctaatgtcaacacatccttatagtatattggtttgcctaggtcctcagttttggtttttttgtttgtttgtttttgtttctgtttgtttgtttatttgataacccagtgtatctcagttgctgttgttccctttttcaccaatattaagaaaattgagagttaacaaagcattatttagtctgtccctgggggcagactacacttcctctgtatgggtggtaggttaaaagagaggttagagcatttaagagccatcattaaaaataggtcttgaaaaagtaaaggttacagcaaagtgtaacaaaataaaatgtataaaaaagtcacagtgaaacccattccatgaaactaaaattgttgttgttgttgttaaagactcagtgcttgggatatggcttattgggcaaaaccctacctaactgaacaagccttacaacctgagttcagaaccctggcacatgtggggacataatcccagcattcctgtagtgagacagcagtggagacagagtggttgtcaggaatcttggccagcagctagcttgcatatggaatacagaggaaattagagaccctgtcttggggtgtgataagaaactgttcccaaaagtgtcctctcccctccgcatgtgtggacacttacacaatatacatcaagcacacatacacaaagatctgagtgacttattgattagacagaatcaaatgtaaatcctccagggtctgcatgtaatgattctagacagagcaattcatggaggttgctgatatctgacagccacggttggtagttgatgtgattgaactcagacagctgatctgatggatccttatgcttctctgtttccccttacaccacacttagggtgtaaaaaccatctgtctggataaatgagtgcaaggagatgagattcaagtctccttaacaccaactgtgtattacattttttgttagtgttttctctcagagtatgcagagcttagtctgcaactattttttttaaataatagagatggtatttcctgatcagatatggagcaaggctacaggatgatgggaataaggtaaagatcttatccttgagttgtctggaataaaattttaaataatggtattaatttttatggttctagttccatttacttattgttttggtgaggaggaaatgagctcaaattacatagctggtcagtttcgtaagtttttaatctgtactagccagtttttcatccctgttgtgactaacagctaaactaagtaagcagttcagaacaagaaaagatgcgttttagttcatggtttcagagctctccatccacgatcggcagctccattatttctgggccttggtgagatagatataaggtataaggagcaaaactgatcatcccatggtggtcaggaaaagagagatgggtacaggaaacaaggaccagacataggctccaagaattccctccctacttataactgtgcctcacctcccaaagcttctagcactaaccctaaattgtgacacatgcaggagagcaaggcttcattcaacataagatcttgtgggtaacacttcatatccaaccataatcggctcagtcagtggctttgattcccatgtccctcctcttaaatttattagaccacaagttttaaagagttatccagggctatagagatggctcagcggttaagagcactgactgctcttccaaaaggtcctgagttcaaatcccagcaaccacacggtggctcacaaccatctgtaatgagagccaatgacctcttctggtgtgtctgaaggtagtatactcacataaaataatttttttttaaaaaaagaatcacccagagtttacaaatgaagatttttctttgtcattgtatttttgtttgtttgttttaagacagggtttctttgtgtagccctggctgtcctggaacttgctcaatagaccaggctggcattgaactcagagatctgcttgcctctgtttccagagtgctgggatcaaaggcattctctactattgcttagtagattttaaaccagttctattttttttttgtgactctagaacttaaagtacataattatttatttattcgagtattttcagatacagtcctactatatagcctaggaaggctgtgaactcataatcctaacacacaatctgtttgaaagctattatgagggtcaactgagatggatgagcaggtaaaggcacttgctaagccacaccagcaacctcaagcttaatccccaggaccaatgtaaaggtggaagaagataagcagctccacaagattgtcctccccggaccttcctgtgcctgtggcatgcatgtcccagcacacacattatgcgcacacatacacatacacaactgccatcaccaccactaggtaaaataagactagcatgagccaggcatgttgtttcatacctgtaattccagcactgaaaaagctgagacagagttgccacagttcacattcagccagggcaacagagtgaatcccaggctagcttgagtgaaattctgtctgaaacaaaacccaaagccaaacaaaaactggccatacaaggtcttacaaaggttatacggaatagggaagagtctatggttcaagcctttgagataactaagatgaaaagtgtttattaaagacgtgaacattattttctttttggctacataaattaacccatccattgcaggctaggcaagtctcagatggaagcacttttactggtctttcagtaccttgagtcttctgatggcagacttgagtttgacagtagagagatattataggtccagcccttgttttctgtcacggagccacagtgccccatgctattggctcgtctcctcatcgtggtcttgccatggatgggacaagtgtacttggtgtgctagctgatctctctgcttcaccatttggcaggcagtactgcttggtagacaggtttagcagttactgagctgacaccaggcatctgtgtgattgggggtaaatgacctgggctttctgctttagtttgcttgccagtagcatacaggaacaggacagagttatgccctctcttcagtaaataatcctcattagtgctgagtgtgagaagttaggcagggcaagttcgttgtcagaagtctttgggcatgaggccgtctgcacctgatatccttcatcttgacactgctaaggaaccacagtcagccagcgatcaatttccaacagccgccgttgtccgcacatagcatgctggaggaaagccagaatttatttttgccagaaactctcttggcaaatgggtttccctagagacggctgtttaattttgtggtgtggcgaatggtttggtggaaaagaagaggaacgcagggtgcttatttgttccataactacctgtgtctcaagacactctgagggggaggggagctgaggtggaaagaagggctgagaaatctcacgctgaaatgcgtttgaactatgcatatgcacttatacaaactaaaactttgcctacagcgcattgccacatcctacagtctgtgttgctgcaatagctccctcactagtttctctgtcctcgagttcctttcaaagcttccacactcacatctaaaataacagttttaccaggctatgttcattcattcatttatttaggaatcttacaacttttttattctcattattgtcaaacatctaaagttaattaagcaaacattgtaagcatctaagtgtaagttgctgtgaaaaggtaaaagtgagtaagatgtagcttctgaaggtgtataatatcaacattattgctaccctccccaggaccttttccatttgaaagttggttctacttcaccgcattctgcttaagcacgctggggttatgctgaggttatctccacaccgccaggctccgctccgcgggcagttttcagtcctaacagcacgtggctttgctatagctttgtatattgctgactaggctcaggcattggatcacatagtccccatccctagctgggatgctgtctagggaagtttaagaagtgcccccttgctgcaggaagtttgtcactggcaccgcctttgagagtgtgtagtgttgctctgttctagtccactttctgtttcttgcttgtagtcgagatgtgctccgtcagcttcctgctcctgcccccttgcccgccgcctgctgccatgtctccccaccgtggtgactcatatccctgtggagccataagcccaaataaacttctatcaattgctttgatcatggtgttttatcacaccaacagaaaggtaactaatacattgaccatgcttgtctccagagttcttaggtaaagaaattactcatactttccatttgttcttggaatttttaaaggaacaaagcataggtttttgtccatctttaattttggtcccttccctatcctaaattggattccagcttactatctggccacggatggcctagaattcctaatccttctggccctacaatttttgggatttttgggattacagaaatgtgtcgccgtacctggatattttaggttgttttctgtgttattcgtttctgtctttattattttctccttttttttggttttgttttttgtctttttttggcttgctgagctgtatgtctttaaagatttatttatttttattttgtgcatagaagtgttttgcctgaatctatgtgtgtctgcattaaccatggaggccagaaaagggtgttggatccctatagctggggtcatagatggttgtgagccacatagtggtgctgggacagaatttttacaaagtcctttttcaagagcagccagtgctctttagctccaagccatctctcctgcgcttttaattttttgagaaagatctgtatttgtgtgtgtgtgtcccctacacacgtacaggtggtgatggaggccagaggagtgctggatctgtgagactggcaggcgttatagaaaattgtgggctgtctgacagaggtgctgggaattgaacctaggcctctgaaagagcagttaaggcttttaaagctgggccatctctccagcccttacctctaaattaaaaaaattttttttttttttggcagcagtttaagatttaatagaaccgagtaaactgcagggtctgttactctgtatccccacagattcagtctttctcactgtcagcatgcagcacagtagtggttacagtccatcaggtcagtcagcctgcattgacatcaggccacttatctccttccgctcacccacgttgtctggctatctctttatcgcctccacatttctgctgttctagatatcctgctgttagactagcacagtatgtagcccgcctgttcaggttggctttttacataataatatgcattaaattattttttccctgtgctgaggtcctcatgaaagatagataatcactctgccaccagtccaccctgcccccagtcagagtaatatgacttaagatcccttcatgtcttaaattttttaatatttatttattctatgtatgtgtgcagcagtcataccacagtacacatatggtggtcagagactgacatctgggagttctttccttccaccatgtaggttttaggacttgaactctagtggccaagcttggtcacaagtgcctttacacactgagccttctcataggccccaagtttctcctatgtctagatattttatttcttgttgttgctgagtaagtaacattcttttgggtaagtgtaccacagtttagatttgtatacatgaaggcaaaatactcatatgcataaagaataaaaataaatatgtaaaaacagttaaaagaaaacatggataagtgggggctgttgtatataatgtatatttcattcaaagaatctatagaccagtaagggaagtaagcacacacttggagagatacttgttaggtcaggggtatatatagagtattgtagaaccctaataatgggcatcacagtgagccacgtttcagtatgtagcttaggctgcccttgaacttgtgtcattcctcctgattctgtcaccttaattctggcattacaaggtatgctgcaaagcttggctgtaataaaggatttggaaccaaaggtttagaccttcaggaaatgaagaacaaggtaaagagtcgatgggggaagtgactgatgactaaggatgttgaacatttttttaggtgcttctcagccattcatattcctcggttgagaattctttgtttagctctgtaccccatttttaaagtagggttatttggttctttggggtctaacttcttaagttctttatatattggatattagccctctatcagatgtagagttggtaaaaatcttttcccaatctgttggtggcctttttgtcttattgacagtgtcctttgccttacagaagctttgcaattttatgaggtcccatttatcaattcttgatcttacagcacaagccattgctgttcttttcaggaatttttcccctgtgtccctatgttcaaggcttttccccactttctcctttataagtttcagtgtctctggttttatgtggagttctttgatccacttagacttgagctttgtacaaggagatatgaatggatcaatttgcattcttctacatgataactgccagttgagccagcaccatttgttgaagatgctgtcttctttctactggatggttttaactcctttctcaaagaccaagtgaccatagatgtgtggatttatttctgggtcttcagttctattccattgatctacctgtctgtcgatgtaccagtagtaccatgcagtttttatcacaattgctctatagtacagtttgaggtcaggcatggtgattccaccagaagttcttttattgttgagaatagtttttgctgtcctaggtttttttgttattctagatgaatttgcaaattgccctttctaactctgtgaagaattgagttggaattttgatgggaattgctttgaatctgtagattgcttttggcaagatagccaatttatactaatcctgccaatccatgagcattggagatctttccatctttgagatcttcttcaacttctttcttcagagacttgaagttcttatcctacagatctttcacttgcttagagtcacagcaaggtattttatattatttgtgactattgtgaaaggtgttgttaatttctttctcagcctatttatcctttgtgtagagaaaggtcactgatttgtttgagttaattttatatccagctacttcactgaagctgtttatcaggtttaggagttctctggtggaatttttggggtcacttatgtatactatagaatcatctgcaaatagtgatattttgacttcttcctttccaatttgtatccatttgatctccttttgttgtctaattgctctgtctaggacttcaagtactgtattaagtaggtagggagagagtgggcagccttgtctagtccccgattttagtgggatttttttctttttttaaaagatttttattttatgtgagtacactgtctgacacatcttacagaccccattacagatggttgtgagccaccatgtggttgctgggatttgaactcaggacctctggaagagcagacaatgctcttaacctctgagccatctctccagcccccgggattttttttcaagattctctctatttagtttggtgttggctggtttgctgtatattgctttgattgtgtttaggtatgggccttgaattcctggtctttccaagacttttatcatgaaggggtgttggattttttcaaatgctttctcagcatctaatgagatgatcatgttttttttttctttgaacttgtttatatagtggattacattgatggatttccatatgttgaaccatccctgcatccctgggatgaagcctactttatcatgatcgatggtcgttttgatgtgttcttggatttggttggcaagaattttattgagtatttttgcatcaatattaataagggaaactggtctgaagttctctttctttgttgggtctttgtgtggtttagttatcagagtaattgtggcttcatagaatgaattgggtagagtgccttctgtttctattttgtggaatagtttgaggagtattggtattaggccttctttgatggtctggtagaactctgcactaaacgcatctggtcctgggttttttttttggttgggagactattaatgactgtttctatttctttagggaatatgagactgtttagatcgttaatctgaccctgatttaactttggtacctggcatctgtctagaaaattgtccatttcatccagggttttcagttttgttgagcataggcttttgtagcaggatctgatgattttttggatttcctcagattctgttgttatatctcccttttcatttctgatcttgttaattagaatactgtccctgtgccctctagttagtctggctaagggtttatttattttgttgattttctcaaagaacctactcctggtttggttatacattctttttgtttccacttggttgatttcagccctgagtttgattatttcctgccatctactcctcttgggtgaatttgctcctttttgttctagagctttcaggtgtgctgtcagtctgctagtgtgtgctttctccagtttctttttggaggcactcagagctatgagttttccttttaggactgcttccattgtgtcccataagtttggataagttgtggcttcattttcattaaactctaaaaagtctttaatttctttatttcttccttgaccaagttatcattgagtagagtgttgttccactcccacgtgtatgtgggctttcaattatttatgttgttattaaagatcagccttagtccatagtgatctgataggatacatgggattatttcaatcttcttgtatctgttgaggcctgttttgtgatcaattatatggtcaattttggagaagatgccaagaggtgctgagaagaaggtatatccttttgttttaggataaaatgttctgtagatatctggtaaatccatttgtttcataatttctgatagtttcactgtgtctctgtttagtttctgtttccatgatctgtccattgataacagtggggtgttgaagtctcccactattattgtgtgcggtgcaatgtgtgctttgagctttagtaaagtttcttttatgaatgtggatgcccttgcatttggagcatagatgttcagaattgagagttcatcttggtatattttacctttgatgaatatgaagtgtccctccttgtcttttttgataactttaggttgaaagttgattttatttgatattaggatggctactccagtttgtttcttgggaccattttgcttagaaaattgtcttccaaccatttgctctgaggaaggaagctatggcagcaatgctttaactgctgacccaccttaccagccatgtttccacatttgtagtttttcaaacagctacttaaagactattttaaagttaggcaaataagaataaatacaaaaagaaaacctccacaagataggtgaaaatatcttctacaaaaagacttgtccatagcagctttccccacttactatgtagaaagttatagcaacccacatgtccattaacaagagaataaattgtgattatattaatagaatgtgagttaacaggtgtagccatttgttatagctatcaggtcttggtgatttacccataactcccaaataataatttgggaggtggaggcaggagaatcatctttggctacagagtgactaggaagatagcctgggctccatgaaatagtggggatctagctctgttggtagagtgcttgtctaacatgctctgaaccccgagtgcagcccccagagctgcataaaaactgagtgtggtggcagattcctgaaatcccagcacttgggaggtgaacagaggagccacaggttcaagatcatcctcacgagcatagaacgttgagagcttggggagaccctgtctccaacaaagacaaacccaaaccttttgattctaatggaatgattggggatatagcttcatggaagagtgcttgccagctgtgactgaggcccaggatctgacggcagcacctcaaaaaacaaaaaacaaaaacaaacaaaaaaaaaccacaaatttttttagttaagattttgctttccagtttacataaatattaaaaaacttctaaaaaatgacagtcacaccaaacataatggctcatgcctgtaatcccagcacttaaagattgagacctggtgaggattgtcacaagtgtaaagccagtctgagctcaaggataagtgagaccctgtctcaagcaaataaacacaacaaaaacatcagatgggaggagggagaggagacaaggcaaagactataccccatgcctaaatcccctaagttgctagaactgggtgattgggacataggggctcatggtagcattctttgtactttatatggatttgaagttttctgtaatgaaagtaagagcaaacaaagacttaggaggacagcatttgagcccacaaagtctccttctgtcgcagtcagtcagatacagatgtttctgctactcaggcaacagtattcaaactctacactgctgcttgtaggggtttgtttgggagaagctcttttttgttttgttttcaagacagagtttctctgtataaccctgtcttggaattcaccctgtaggccaggctggccttaaactcaagagatctgcctgccttggcctccccagtactgggattaaaggtatgagtcaccacccagccttttttttttaatgatttatttatttttatcttatgtatgttggtgtttgcctgtatgtatatctgtatggggctgttggatcccctagaattggagttagagacagctgtaagctgctatgtgggtgttgggagttgaacctgggtcctctggaggagtagccagtgctcctaactgctaagccatctctccaacccctgggacaagttcttatgtaatacaagctagctcaaccttgagatcctcttgccatagcctcctgaatgctgggatgtaggtgtgtgtgtcatcatacctgacaacgtttttgtttgtaatctttaatcttctcatttcatttcatcaacactgataactagattttagtttggtgaatctgccccagtgttgaagctgtggtcatccaccatccatcggtggatcagagcaggaatcccatcttcacatcactgcagggggctgcagtggtccacatacaccaccggcagctagcaagtctaggtgttttctcatcctcagatgagagctcacataacaacgtggaacccataaaacttacagactctcatgacggctcagtgggtaaaagtacttgccactgaagacctgagttcagttcctgggggcccacacagtcggagagagctgatgccggtaaactgtcctctgacctctacatgagtgtcatggcactagggaaagggggaatcatcgtgaggagttgcaggatgagcaactttctgaagcttatttattgcaataactataaaaaaacctaaaccttttcttagttgattcaggaagtcacaggctttgtgggatcggttaaaggaacaagcaacaggagtagagcaatggaaaggggcagtaagtggaaataggtggaggtaaaccaggcatgccactgcagggacagactataaatgacagagcagagaagggctttacctcagtgtacacagcagcagtgatggggaaaacacagctgagggattatttaattcagaggggaaactagaagacatggcaactgtaggagtgactgtggttgatagacttttctagaaatgagtgtcagaaaggttgtgacccgagactatagcatctagatgcattctgtgaacagccaaacatgtccatctatgctgtgctaagcataacctcgaacaaacaaacaaactttaactgagtgaaggacaaatgaagatgaacttaagaagagagtgcctgttgggaaagacctgcagattccagaaagactaccaggaaggagagggccacccacgttcttaataaacttttatcttggccaaccacagagtccaacgagtctacagaatgtgtaccaggttggatctgggtcaacctcaaatgtggttcctcacggatggttgtttcccctgggaccagattgtataaccaggcacaaaatatacatctgggaaatcctcttcctgtggcctggtttactatagattcagaagttcagttaggtgagagggtagaggagccatgttaaacaaaacaggaacaaaaagtaaaaaatatatatatactgaaaggaaatacttttaaatgactcaagaggcagaggcaggaggatctccataaattcaagtccagtctggtctacagaaccagttccaggatggctagggctacttagttagacccaattaaaaaaaaaaaaaacaaccaaaaactttcttgtgtctttgagggttttttaaaaaagattatttatttatttatttatttttttatttatttaatgtatttgagtgctctaactgcacacacaactccttaccagaagcgggtatcattatatatggttgtgagccaccatgtgtttctgggaattgaactcaggacctctaaaagagcagccagtgttcttaaccgctgagccatctctccagccctgtgtctttaagaaattgatgaaaatgtcattattaagcaaaaagaccatataaaatagtgcaatatgagaatgcataagtggattttttagatagctaaacttaaaatatttaaaaagtgataacagctgggccgtggtggtgcacgcctttaatcccagcactcgggaggcagaggcaggtggatttctgaatttgaggccagcctggtctacagagtgagttccaggacagccagggctacacagagaaaccctgtctggaaaaaccaacaaacaaacaagtgatagcattagctaaacagtataataaagaatatcatctaaaacactaacatgataaccttcttttcctttttgtgactgtgtctctcataacccagactgggctcttctttttaaatttagttttcaaatatcatgtgcatgagtatatatgcgtgctgtgtagtatggtgcctgtggaaatcaaaagatgttggatcctcttccatgatgatgtggagatgtgggtgctgggaacgccacacagacactcccatattgacatatgtacacattaaaaaacacaaactatttttaaagtgtgccttttggggagcctataacctgtataagctgggatctttaacagtgtctgtcagttacagatggcttcaagagttccctatatatacagctcttgactcagaaatcgtctctgtactctgggttttgatttgctttctgcctaaccctaaggaactttctagatggttgtcactctagagttgccatgctcaagacagctacatcgtcatgatctatgtgttcttagatcccgctgcactctcctcaagggcacataagttatagcagcttgtcttcatattccccatcccagacttctctgcccccagagcctgtgtacaccaccccacctcacttcaaggcttttggtttagcctttgcacattatactttctctgtgtgcctgctagatttatctgatgtgctcgcctttgtaaataccatttattttctgctcttttttcaaggaagtctgtcacagtttatctgcataaagtgtttttctgtagcccttaaaaactagaacacagaactgcttcctcaacacaattgtcaagtttttgagaactggaaaagtgcctccttctactacacaatttaggacaagcaacctgggatttaaaaaattatttttaaaaagtatcagtagcaacagcaagcaatcattactctctagtagtggagatctggcttcctccagaccctgccaggagtgcttcaggcctgcctcccagttccacaggctagcctgtgtctgattacctccctagcctgtgttcctgaatgtttctctcggtcaccacgccctacaccccttccttcctctcacaggcttttactgtggtaaaagttgtcactcccttgctcagacacacaatgtgttgtaaggcctgggtgctcagctgggctcttcaactggtcggtttaagcagcaatgtttccttacccctccaacaccgcccaacctctttattcctggctgtatgctaaggtttacccgctttgaacatgttcttttctgggacaacacttagctcataccacaaatagtccctttcaatgttcaagcatacagtattgtaaccatctaaatgttcaagcatactgtaaccatctaaaactgaattcaatgaccgtctcctccaggacattattttcaaaatcctctactctttgttacctccaactacacaaatctctttagagatcctgccctgaacctggttttaatcatgtgttgccgtaagtatgctttttacatgctatctggactttaagctctttgaaggaaaggctatgtctcatgcagagtctcagactgagcacctaatgctatttgagccctaatagatttggctcaaataatacattcttttgattgacatcagtcttcttcagataagaattttgtgctgaattgtttaatacttttgtattttaaaggttggtgtttaatcagtttatcaaacttttggtgagttcctatgtgtgttaattgtatggatatatgtaaatgaatagcttcccttcagaggtcttgctatttcctcaggtcttcctctgaactgggtacttttaactacctgcctgatacggtctagaattaactctgaggagaaggactgtcttgatggttacttgatgctgggagactcagctctttgtggtggtaccatttcatgggctagctcctacagtgcattaagaataaagcaagtttcctgaacataagcagaagcaggcaagcagcatggcgcttttctcttgtcttgactgtagctgtgatgtgacaacctggagttcctctctgttctgcttccccttctctttcccttccgctttccaagcagtcccttcccattttcatgtcttccctttctgtgtggtcaaccaatgagtttaagtatggttgtttacagaagtgtgggtaactgaacagtggttataacagtaaagcaaatgtctctccctaccccgagcaaccattaactgcctatagatcctcaaggaaaggtagaactttttgagctccaccatactgcatgacagacttgataaacctaatcttggacatcttgttcaggtaattgctactactgacagatcacgagtgcagtggtcatctcatgctgagaagacaggtgtctataaatccttctcttcctctactcctacctcctttctgtgcagttgtctgaaccttggagggggtgttgtcccatttaggactaagtgttacttttcagaactttgactggttttgaatctctgcagtaaccacccctactgttaatgacattgtgcaaaacagtgtggaaacttgtttggagagcaaaagtcacaaagatgttcatgtttcatgacttataaacaaactactattaaaagacagcctaaggaaaataattgaaaagaatgaaactaaaaatctgtgtgtgtgtcttttgcttatacccagcagagctgaggaactaaaacaaatgttaagaaagaaaagaggctaggtaaataatgttcatttggctggactgagtatcattgcaacactggaaacattgttaaaaactaggctaacagtgtttacagagccgaaagaatgcatactgattatagctgtctataaagtaaattgcatctgaatgactaggaaagcaaacagataattaaagctgttcttctagtataatggaattatagacacattttaaaatataaccagaaaaatctgaagagtttcagattgtcagttaattaaggttatttttgtcttggaagatttgagtaaaaagaagaccctagatactgaaccctttcccttttctttttttttttttttcttttttttgtttttgttttttgtttgtttttgtttttcaagacagggtttctctgtatagccctggctgtcctggaacttactttgtagaccaggctggcctcgaacttagaaatccgcctgcctctgcctcccaagtgctgggattaaaggtgtgcgccaccacgcccggctccccctttcccttttctacatgagcctaaataattatgtcctaggaatgaaggaaacctctactttcttacagttattaaaacagacatgctgggaacatatgatattagaatggcctcctgggggagatcacagactccattctcagatgccattaagacaattacaagtttatcttcactccagcccctgacaaccactaatccattttgtgtctcctatgtgagcttttttttaaaaagaatttatttattattatacataagtacactgtagctgtcttcaagcgtgccagaatcaggtctccttatgggtggttgtgagctaccgtgtggttgctgggatttgaactcaggacctttggaagagcagtcagtgctcttacccactgagccatctctccagcccccaatgtggcctttttaatctggtttctttacatgtatgaagctttcaaggctcacatttgtggtatgcaccaggactctagggtctcttgtagcccaggctgatcttgaacttacactatagctgaggaggatgaccttaaattttgatccctccgcttttgccttttgagtgctgggattataggtatgggcctcctagtcagtctccatggctctgggaattgaatccagggcctgtgtgtgctaggcagacatgatactaaagttccatccccatcccttcatttttttatgatcaagtaatagcctgttgtataggacagcatactctgttatctgctcgccagatgataggtatttgaattttctccattttttactattacaaggaatgctgctatgaacatgtggaacaggtccaaattcatgtgtggacatttgttctcagttcttttgactgcatacctagaaatggaactgctgggtcacacgctcagtttttccttaaccttttgaagaactgccaaattgctttccaaagcagctgctccagtcttcatccctgccagcagtgtgcaagagtctgataccttttggcttcatttccagctctcaatgcaggacttgctctgtggtaaacattgagtagatgccaaatttcttactgatgttctcacatcagggaaaactggagtaagcaaaatgaaggctgatagctactaaaacctcctgcagatggtggaggcttcagacagtgtcagagccctaccaacatggctacagcttgggtatggcttaccctctaagtttcatgtcctggaaactcagtccccactgtacaagcatggaggctgaaggatgacaattttggtatattctttatttttctgtttattagggttggaagaatgatgtagatcagagaaaataaacagagaagagtactaaaagattgtttcagagtaggggctgtgaggcatggttagagcctctggtatgtgctgtgttgtactgttgacagcttcttacactctgtggtccctgtacattgtatgtgaagcctgaaggaatttaagagatgattagactccttcacagggtgaggaacagagtacccagtctgtgcagtttatgtgaaagaggctggtatcaggaagaataaaatgggtgtttctggcgtgttctactgaaggactcagaatccatctttgtgatatttcaaaagcataagtgtcccccaaatatggataaaatgagcagaccagtttgtcttcttcatatcatggcttaaagactgtatcctttaagaattggagcacacagggctactgatgggtagagataactcatcagaggtctattgtagcccaggctgatcttgaacttaaggcaatcagtatcttggctcacccttaattctctcacatttcattgtatgatctcaggaataaagtgtataaatgatggtattataatgatttggtattaattttgccttagttagaaagccagcctgtttttggcatgaatgtggtggacagaaatagcagctcagctaactctgtggtttcctgcatgtgataccatggctgctaagagtctgttcagcgtagctacacaagattgacaacaaaaagactatatacttttaaaatttttaaacctgccctgtaccttttgatttttctgaactcatagattatgaactctaaagacagcaagctcagctctgtacacttgtcaagcctttgagaggagtgtagggtgtgctcccaggtttgagcaaatgaaacccttttgaggtacctaatacattgtaatgcttttcaaattacttttaggagttagggagcctgcccagtggttaagagtacatattgcttttgcagaggatcagtgtttggttcctagcaccacatagtggttctcaatgatctgtaactccagttccagggcatctggtaacttcttgcatccactggcactaaacatacacatggtgcacagacattcatgcaggaaaaacactcatgtacataaaataaaaataatcttaaacaacttaagagctttcactctctttacataaaatttcttgcaaatttttgtataatatttttgtactccacctgtcttcccttccatctaagagaatcctttatacggacacatagatttttaagttttcattaatgtaattctattgtaatacttattctgagttatgaatcataagttaaagaacaaactaccacttatgaccttatatcgacccagtgtctgagttcttaggccagctgaggcacacttgtaatcgcagctattcaggaggcccacagtcagcctgggcaacacaagtgagacctgtctcaaaaaagttttaagggactagaaagatggctcaacagttaagatgactgactgctctttcagaggacccaggttccattcttagcacccacatgttaactcacaaccacccatcattccacatctgatgccctctgctagtccccataggcactgggtacacacatggttcacacacatacatacaggcaagctcctatacatataaagaatttaaaagttggcaaagtttctttatgtaaccttggctgtccaggaatttctctgtagatcagactgctctagaacagagatccacctgtctctgcctcccaagagctgggaataaaggcgtgcaccaccatgcccagcagaatttaaaagttttgagttcagcccataggggctcacagagactgaactgccaaccaaagagcattcaggggctggacctagtctccctacacatctgtagcagatgtacagtttggtcttcatgtggatccctaacaattggagtgggggatgtctctgactttgttggctgccactggacccccttcccctaactgaactgtcttgtctggcctcagtgggagagaatgcaaattaatgtcccatggtggggtggtacccaaataggccatccccttcactgaggagaaggggaggaggtaattgtgggagggatttgtaaggatgggattaggaggagaaggggggggcctgcaaattggaatataaagtgaataaataatgaaaaaagtttttgagttcaagattgcttcatttactaagtgccgaagtcaaaacaggaccgtaaatttttccaccacaagtccagagtgcttcctcatttaactgtgtagtattgtgattccaagtggagtttgggacagcaccaaagtctgctgaggatatggaaagaccagatcactcccacattgctagcaggcagataaagtgtaaaacccctttgtaaaatagttgggcaatcacttttgaagctacacatgctacatgacctggcacttatgttcctgcttgtttattccggggaaataaaaacttgctttgacacaggagcccatataaaggtcgggagcaacccatgtgtcgccttggtgtcaccgagtaggaaagcttaaccaagttctagacaaatagatgtgggatgctaccaaaagatggaatggaacactattgacacacatggtctccaaatccattcagactttataggtgttatctttcagggtttaggggtctgaaaagcctaagatgaagataccagcaggcagacacattatttagtgaaggtctgttttctgcactgtggaatgctgccttctagctatgtcccttcatggagagaactcaacaaaacaacaaacagaaacaaaccgaggccccttataagtgtattaatcccataaatgagggctacaacctcatggcttagctgccttccaaaaactcctgatgccaccaacttgaagaatttggaggagtgggtgtggccctgcgttctgccttcccgctggggtgtggaactccagccaccaatcagaaactaggaaacacagcctaagatggagactctagcctgggtggaaaatgacacaggctgaggacgaagttggggctctccaactcctgggcatccagtcaccgctggaaaccttgtggagttgggaacaaagtgggccaccaggcctgcaatgagactaggatcagaaggatagggaactctgacttagctcagggggtgaatgtcccggagtactgaggggccttctgcaggagacttaggttagggctctatacgaggaagccccccccttcacccccacggtggttcttgatgagagagacagtccttgattccaaactgtttattgattgttcatcctgaagaatatatgcatacaacttcctcagggtggaccagagattaaataccatttgcagggaggaatgtctgggaagggaagcttattggctaacctctcagggactatctagatacctcattggcatgttttctgtgttttgtgcttcgtgaccagtggtcacattctttatgcgggcagttgtggccacgtgttccaggccaggaatctgtttgaaacacctgtcgtcctcaggtgggtccctgggtgccagggcttctgaacacacttgaccttaccaagtttcctggcacggcccactgccccacaagtgggagcacaaacattcaaagcagcgtaacctggataagtctccagaaaattaggcacagtgaaaaaaaaaaaaccaactcaggggttgaagagatggctcagtggttaatagcactggatgctcttcttcttacttccataacaacacatgactactgccttacctcagtaccctgtagttcagcactcactagggccctccgtgggtatcaggcatgcacacaatatactcacacacatacaaaatttaccagtctcaaacccttgtcaactgtatgatgccttttatatggcagtcgtgaaattgtagcgatgagaatggattaatgttgccagggagtgggaggggatagaggtgactgtgattgtaaaaaggctgtgaacttctaatgacagaactctttagtgtgatcataaaattgtatagaaataaatatagccattctaacaccacaagcacatgacctgtgtatgttaaacaggaagtctggggctgacaaaatggctcagtgggtgaaagtgcttgcccctaagcctgataacctgagttcactctctggaacccacagggtggaaatattccctacacatacaaataacgtaagtaaaagttgggtgtggcagtacacacacctttagtcctatactcaggaggcagaggcaggtgtgttgtagatatctatctatctctgtgagttcaaggccagcctggtctacatagggagttccagaatggccagggttattttgtgagaccctgtctataaacacaaaaataagtgaaagaaattaatgaatctgaataaaatcagtgagttgtatcagtattgtagttgtagtattatgatttccaaaatgttatcattgggagaaactgagttatttctcagcagctacatatgatcctataaattttataggttatatctcagcagctacacatgatctgtacaaattttatgtattcaccattgctctctcagacacaccagaagagggcatcagaccccatttcagatggttgtgagccaccatgtggttgctgggaattgaactcaggatctctggaagagcagtcagtgctcttaaccactgagccatctctccaggccacgtacaaattttaaaatccaagttttaataaattactcaaatttatagctgggtgttagtggtgttggcctttaatcttagcacttgggaggcagaggcaggtggatctttgagttaaaggccagcctgggctacagagtgagttctaggacagccagggctacaaagagaaaccctgtctcaaaagaaaattacccaaacttatttttaaaaacaacaacacttatttatatgtttacatatggcagcaggtgtcagcggatgacctgtgagtgttaggacgcccctagatgtgggtcctcggggttgaactaggtggacgcctttgttggcgtgcctcgtctcaccttccaggagctgcagcacttgtgttccttagattaccattagctgtgacctatcactcaaagtcatttactaaatgaaaccttgggatggaagggtctgaggttcctataatctcactgttgttgactggataggtgttctcccatgggtcctcatccacttagcttttatttacagccattttctcctaggtgtgggaacttgtaaggggaatattcctggcttggatggttcttgctatgaatagctaatgatctgagttttcagccttggcatccttgaccaccagagttgtcctccaagctctacacacttgcagtaagtagtacatgcacatattgtttgagcacacacacacaagcaaataaacaaaatgagtatgattcccaggcctaatcccaaagatttagattcagcaggtcttgggataaatcttcgaaactcttacttaaagaattttatcagctgattctgattcaacagatcaatcaagttctcatggaatatatcaacagctatgaataatgggctatgagtttattatgagcagataagaaccttttaagtccttttgtggcatagagcaattataatcaggtgagaattttaaagtcaacttactgataaaatgtttcaaacacccgtgtgttgaaaaagaatgcttgactaaactcgctgtgcactgctctgagcacttagagcagaagtggcttggctttggttcttgctcctgctgaagaggccccgccccacttcttagctattctgcttgagtgatccctcatgagttctttgtcacgaggtgagcagagactcgtgcttagttacctctgctcaggaaaggaaggctctgccagcctagaaaacagaagctcttttataagctctgaaactacacactcatttattctctatgttttggaaatgatggagtttagtagatttttgttcttgttaattattatnnnnnnnnnnnnnnnnnnnncagaaccaaacagggtatgtggtcagcatgacaatgctctgagtcaatttttttgtgccagtgactggcaggcatgttacagcaacaatatgaaatagctggcaggcatggaacaaaatggctgcagctatgctgtggtgaacactcctcaacacagacccttggtaaaatttaaaatccattcatgtcttttgcctatgaaacatatgctgcatatttaagaaatttgtagcatttcagatttcatttagtgttattcattaccttagttaagcattgtaggtaattctgtcactgtattttaatgaaggattttggctagctgcttttcagcattcctgttagggcagagcaaagcctgttactgcctgggcttgagtttgttttgacaagaaattatcagtgtagaagtggccacaactcttagaatatctccctgcattttctttataattttattcctaagtaaacattgctgttatcaaaacagctgttatttttctttaagaactttctctaggttttgtttttagctttctttacaatttgagaactgagaaggtaattttagattaacacctgttggagaaattccaaaattatagagggccatctgtttgcatgctttgaaatattttcaaaataagattttgtttgtttcattgcagagtctcagtgtatagctctggctgccctagaactctgtttgtcctctaggttggcttccaactcagagatccccgtctctccttcccaagtggtgtgatttaaaggtgtgctcctaaaccttactaaaaacattttatcattacaaactggttttttgttgttgttttgttttctctgtgtagtcctggcagtcctgatactagttctgtagaccaggctatcctcaatcttggaaaactgcatgcctctgcctcctgagtgctggaattaaaggtgtgtgctaccacatccggcttacaaactgatttttaaaaaaatatttatttgttttgtgtgtgtgtatgtgtgtgtgtgtgtgtgtgtgtgtgtgtgtgtgtcttatgtttgagtatccatagaggtcagaagaaggaattggatggatctcctggaactggagctgtagacaattgtgagctgctaatgtgtctgaggatagtaagagtgtgctcatatacataaaataaataaaatctttttaaagaaacaaaatatgccactgtcaaagaaatgaacctgtagtagtctgtagaactgggttctggggaaggtaaaataagtatatttgaaaaaacagtgagtgttaatttttacaagcttttgagaaaacattgtaacattatgttatcttaatcctcttaaaactgcaaagcttttgacctagaaatgtcagttactgaaatcctctctgaagaaataatcaaatactcaggcaaagatttatgtatttaatacaataggctatagagcagagcagttacaagtcctgaagcccagctgcctcagtccaaattcaggttctcttacttggaaccactttggcttagcttaatccttaatgcttcaggtgtctctgtctgtaatgtgaggactaatccccaccctgtagagttcttgtaagagaggaatggtcatcccttcagagtcagtcagccacaacaacagtgtgtgtaacaccatcctgcaaacatacagcaaacacgtgtttctccctcacacaccagatatgctctgctggacctgggtatgggtcctatggactgtagtgtcacttgctcttcaggggtcagtaagtgaacagggatgtatgtgttcctgtaggcaaatcctgccacgcacactctttgcaccacgcttactgacgatctcaggccaaagcacatcgcatgctaaaccaacatccatgatttaaacattggctttaatggccatacagcctctgcaaccattgaatgttaccattataggatggaagctggattagttaacacattgatttatggggtcatgactataatttaaataaaatcatgtttttaaaagcaggtggcacgttggcttatgggcctgagttttctatccattgactagcttattctaatcagtcagaaattttcagagggagctgggcagtggtggcgcatgcctttaatcacagcatgaggaactaaccgtattaaaggttgaggagcactgcacaacagcaattcttgtttccagtcggcttagaaacgtgctatagaagctgacagttgtaactgggcagtggtggcgcatgcctttagtcccagcacttgggaggcagaggcaggcggatttctgagtttgaggccagcctggtctacaaagtgagttccaggacagccagggctatacagagaaaccctgtccgaacccccccccccaaaaaagaaatttttagaggatttaataagttaacatactaaagtacataccagttgcatatgtggaacatcactagcacatgttaatcttcattagcagtattgcttttgttactttagcaaatattggaaataataggtgttcaacagtccacataaggtcaaatatattacagcacaccacacttttaaatgttacgtatccttttagacatcattttaaagtaactaaggggaggacctggcttgatttagagtattttctgcgcagccatgagacccgaggttcacattcctggcacccatataagaagctgggcatggttgtactcatgcctggaatcccagccctgggacaagacaagagggtggttggagcttgctggttgctagcctatctctaggttgaaagtccctgactcaagggaacaaggcagaaagtgacagagcaagacactcaatatcttcctctggcctctgtagaggcaggcattcgcacacatgcatgtgcatatactacatgtatatacacccaggtacatacacttaaaaacatttttttcatttatttaaaaaaaaaaaaaaaaaaaaaacaagggctggtgagatggctcagtggttaagagcactgactgctcttccgaagatcctgagttcaattcccagcaaccacatggtggctcacaaccatctgtaacgagatctaacgccctcttctggtgtgtctgaagacagctacagtgtacttacatgtaataaataaataaatctttaaaaaaaaacaaaaacaaaacaaaactttttattttttaatgtaaaggcgggctggaccaatgttcagagtgcctcctgggcctccagaggacctggtttacttcacactattcatatcaccagaaggcttaaaatcatctatacagacacacacacacacaactaatgacttaataaaaacctaatgagaaaggaatatgtttgtattcagtaaagagataatttctgttatgacatgagtctatttttttaaagaaaataatgtattttgtgtgtgcaaaggcttattctccaggatagctgagagagtaaactagatggacactttccaaggtccagtaagaagaaacagttctgttctaggactcagaagatggtcaggacactggcccatggggtagcacccctctactgactcttcctcgagcgtccaactgtcctttcaatgataataaggcagaatactagtgtacagacgagggcagcctctcatgcctctggnnnnnnnnnnnnnnnnnnnnatccaatgccctcatctggtgctgtctgaagtcagctatagtgtactcatatattaaataaataaataaataaataaataaataaataaataaataaatctttttataaaaacatggtgaggttagtgggatggctcattcagtccagtgcttccaggagatgcttagacccacattaaataaacaacaaatacacagatctgaagctggacttgtagctgttgataaagtactaacaaaaatggggtcctaaattcaatccccagcatttcacaaactaggtttggtagtgtacacttgttgcagtatcttttatttgcctgataatggtgaaggcttactgcctctgtctgctaacctaggcccagacctggaagtgtctagcctccatacaatctaatctaggcctagactgctcggcctctaaggcttagtgctgaatacactcacccttcctagttctttctgaactgtgactggctgcttcatctcagctgatctggctcaaactcctcttcacactaactggttcagtctggctttgcagagttttcttgaattgcactgcttgacctcgtgctaagtttggcaatctgctctaatctcctggctctttctcatctctggcctgttctgtctttacctgtgtctgtcttctctctgcagcctgtctctgcacaactgtcccagtaaaatggccctttttctcttttctttcttctctcctctctcccgctcctcacctctcctcctctctcttcccttctcctcccctccccaccgctctctctatgtactctctcttaagcttttccctttcatctctcttctagtgagagctgggcatattctagtttgtcatatctttctctgatttgtcactttgccagtcaattagatgtcttctttccaacgtggctgcttccttctataatctaactttacctgccttgtttgagattaacggtgagtaagtgaagctcgctgatcaggctgggctaactggtccactcctgggatccctgtctccagcactcagctctcgggttacatggacacacaccatgtccagcttttatgtgggtattggctgtttgaacacaggttccactgcaagatctttctagactgttggagtccatgagtcccttacaaaggccacacaaactccgatctcagtcaggcaggggtggtttattgaatgcacaccctaatactgatcagatcaggggcatagtttggacttgaggagctggagctacacccatgaatatcttcctctatcagtttataaaggataaaaaccacaatgcactcatacacaggtgcaggaagtgctgttcagtggtcagctctgacgcaagccattttagaaataacagtttatattaacctttaagttgataggtcctatgtaaagctttgtggatttttttaaaaatgttttgtttttaaagatttatttgtttattatatatgagtacacctcagctatcttcaggcacaccagaagagggcatcagatctcattaaagatggttgtgagccaccatgtggttgctgggatttgaactcagaacctctggaagagcagtaagtgctcttaacggctgagccatctctccagccctggattttttttttttttaaagattaacaaaccttgtatagaacatacagaaccaaacagggtatgtggtcagcatgacaatgctctgagtcaatttttttgtgccagtgactggcaggcatgttacagcaacaatatgaaatagctggcaggcatggaacaaaatggctgcagctatgctgtggtgaacactcctcaacacagacccttggtaaaatttaaaatccattcatgtcttttgcctatgaaacatatgctgcatatttaagaaatttgtagcatttcagatttcatttagtgttattcattaccttagttaagcattgtaggtaattctgtcactgtattttaatgaaggattttggctagctgcttttcagcattcctgttagggcagagcaaagcctgttactgcctgggcttgagtttgttttgacaagaaattatcagtgtagaagtggccacaactcttagaatatctccctgcattttctttataattttattcctaagtaaacattgctgttatcaaaacagctgttatttttctttaagaactttctctaggttttgtttttagctttctttacaatttgagaactgagaaggtaattttagattaacacctgttggagaaattccaaaattatagagggccatctgtttgcatgctttgaaatactttcaaaataagattttgtttgtttcattgcagagtctcagtgtatagctctggctgccctagaactctgtttgtcctctaggttggcttccaactcagagatccccgtctctccttcccaagtggtgtgatgtaaaggtgtgctcttaaaccttactaaaaacattctatcattacaaactggttttttgttgttgttttgttttctctgtgtagtcctggcagtcctgatactagttctgtagaccaggctatcctcaatcttggaaaaccgcctgcctctgcctcctgagtgctggaattaaaggtgtgtgctaccacatccggcttacaaactgattttttaaaaatatttatttgttttgtgtgtgtgtgtgtgtgtgtgtgtgtgtgtgtgtgtgtgtgtgtgtgtgtgtgtcttatgttcgagtatccatagaggtcagaagaaggaattggatggatctcctggaactggagctatagacaattgtgagctgctaatgtatctgaggatagtaagagtgtgctcatatacataaaataaataaaatcatttaaagaaacaaaatatgccactgtcaaagaaatgaacctgtagtagtctgtagaactgggttctggggaaggtaaaataagtatatttgaaaaaacagtgagtgttaatttttacaagcttttgggaaaacactgtaacattatgttatcttaaccctcttaaaactgcaaagcttttgacctagaaatgtcagttactgaaatcctctctgaagaaataatcaaatactcaggcaaagatttatgtatttaatacaataggctgtagagcagagcagttacaagtcctgaagcccagctgcctcagtccaaattcaggttctcttacttggaaccactgtggcttagcttaatccttaatgcttcaggtgtctctgtctgtaatgtgaggccaaagcacatcgcatgctgaaccaacatccatgatttaaacattggctttgatggccatacggcctctgcaaccactgaatgttacctataggatggaagctggattagttaacacattgattatggggtcatgactataatttaaataaaatcgtgtttttaaaagcaggtggcacgttggcttatgggccagagttttctatccattgactagtttattctaatcagtcagaaattttcagagggagctgggcagtggtgggcgcacgcctttagtcacagcatgaggaactaaccatattaaaggttgaggagcactgcacaacagcagttcttgtttctggtcggcttagaaacttgctatagaagctgacagttgtaactgggcggtggtggcgcatgcctttagtcccagcacttgggaggcagaggcaggcagatttctgagtttgaggccagcctggtctacaaagtgagttccaggacagccagggctatacagagaaaccctgtccgaaccccccccaaataaatttttagaggatttaataagttaatatactaaagtacataccagttgcatatgtagaacatcactagcacatgttgatcttcattagcagtattgcttttgttactttagcaaatattggaaataataggtgttcaacaatctatataaggtcaaatatattacagcacaccacacttttaaatgttacgtatccttttagatatcattttaaaataactaaggggaggggctggcttgatttagagtattttctgtgcagccatgagacccgagggtcacattcctggcacccatataagaagctgggcattgttgttctcatgcctggaatcccagccctggaattggggaatagagacaagagggtggttggagcttgctggttgctagcctatctctaggttcagtgaaagtccctgactcaagggagcaaggcagaaagtgacagagcaagacactcaatatcttcctctggcctctcagaggcagacattcgcacacatgcatgtgcatatactacatgtatatacacccaggtacatacacttaaaaacatttttttcatttatttttaaaaaaacaaaacaaaacaagggctggtgagatggctcagtggttaagagcactgactgctcttccgaagatcctgagttcaattcccagcaaccacatggtggctcacaaccatctgtaacgagatctaacgccctcttctggtgtgtctgaagacagctacagtgtacttacatgtaataaataaataaatctttaaaaaaaaaacaaaaacaaaacaaaactttttttttttaatgtaaaggccggctggaccaatgttcagagtgcctcctgggcctccagaggacctggtttgcttcacactattcatatcaccagaaggcttaaaatcatctatacagacatacacacacacaactaatgacttaataaaaacctaatgggaaaggattatgtttgtattcagtaaagagataatttctgttatgacatgagtctatttttttaaagaaaataatgtattttgtgtgtgcaaaggtttattctccaggatagctgagagagtaaactagatggacactttccaaggtccagtaagaagaaacagttctgttctaggactcagaagatggtcaggacaccggcccatggggtagcacccctctactgactcttcctcgagcgtccaactgtcctttcagtgataataaggcagaatactggtgtacagacgagggcagcctctcatgcctctggctatctgaatatccagacgtacactccggcttctcttagaaagtaaagattatgctannnnnnnnnnnnnnnnnnnntttaatgtaaaggcgggctggaccaatggttcagagtgcctcctgggcctcccagaggacctggttttacttcaccactattcatatcaccagaaggcttaaaatcatctatacagacatacacacacacaactaatgacttaataaaaacctaatgggaaaggattatgtttgtattcagtaaagagataatttctgttatgacatgagtctatttttttaaagaaaataatgtattttgtgtgtgcaaaggtttattctccaggatagctgagagagtaaactagatggacactttccaaggtccagtaagaagaaacagttctgttctaggactcagaagatggtcaggacaccggcccatggggtagcacccctctactgactcttcctcgagcgtccaactgtcctttcagtgataataaggcagaatactggtgtacagacgagggcagcctctcatgcctctggctatctgaatatccagacgtacactccggcttctcttagaaagtaaagattatgctacaacgtttgctagccctgggtctagacgtcacgtgaagactggcaaaggaaccttcagaatctcccaaactctttttttcttcagtctcacaaaatattgacaattaagtgtgtttttgtgtgtagaaggattgcccatagtacatgtatgtatgtagagaccagaggtagccttggtagtcattcctcgtgagcagtttaccttgtttttttgggatgaggtgtctcactggggccaagtcctcagtaattaggctagactgattggccagctgagcccaggagccttgagtgcctgcctccccagggctggtattacagacatgcctttctctgagctcacccctaggtcttgcctctcagtcctcctctgctgtggcacctggtctacatagctggccctcagtgagctcattggcttgtatgtgattctcttcttcattttctctcagctggtcttgtgtaaccaaaagaatgctaagatatggtgtagcttccatctgggcattccagaacaccttttttttcaggaaaatcatgtaagaattcctttaatcccagtactctggagggaaaggcaggcagatctcttgagtgtctagtcaggtctacatagttcaaggacaggtagctagctatgtagaccctatcaaaaacaacaacaacaaaacaaaacaaaacaaaaaccaacaacaacaaaaatcttcagatttgtttcaaaataaatgatcataatgatgtcagccatattaaaagaagcaaagttgccactttttgtttgtttgttttaagacacactttctctgtgtaataacactggctgccctggaattccctttgtagaccaggctggcctggaactcacagagatctgcctgcccctccctcacgagtgctggaattaaaggcatttaccaccactggtctggcactacagtcactctgggattttgtgggattttcttatatctgccttatatttatttagggggctggtttatgtgtatatgtgtatacactgttcccgccatgcatgccttctgtgtggaggacttacaggaggctgtacattttctctttctgtcctgagggttttagggattgaactcaggtcagggcaggcttggtagcaagccccctttccccactgagccaagtcaccagccttgtgtttttttgttcccctgtcatttttatgtgttttgcccacacatatgtctacacaccacttgtgtacggtgtctgtgaaggtcagaaaggggtgtcagttcccttagacatctagagtcatagatggttattagccaccatgggggtgctaggtcacctggagagcagccagttctcttcatctctctagccccttgcctttgcttttgagaaggatctcatgtcactcagtctggccccaaacttgctccatggctgagttttatcttgagcttttggtcctcctacctttaccacacagtgctgggactacagacatgtaacaagcccagtttacactgtgctgcggatggccccagggctttgtgcccaactgcaccactcttccttaggttggaactaacagagaagatttgtttattatgtacatattttccatttccagtgactttatttataataaaaaattggtgatgattcttaccaggtggcctgtcgttttcagacagatgtcacacactttttaaattagtaataatttatgcattaaaggctaattgaaaataaaattatagtgtcatacaaatttgacatgttgggctgggtgattcttgggggaaggaatatagggtacatcataacatgtctagctgcatctccagatgttacccatgagagtctagtggtgaaccgcagcttgaggctgaaaatgtttccagatgttgccgagtgcctcactagagggctacactgatgcagctgagaaccactgtcctgtgtgtcttactttacaggagtgtaattttgaataaagcaacattccattaggagctgagcacaaaatcaacacaataaaaaacctgctaggcagtaattttaaggtgttcagcatgaacaaaaatttcagactatatttcttaatcaaaggctagattgtcttggcaattgttataaaaacagatcactagaagcattttagcaaatgccacatgggaaaagtagaattagttgacagagatttaatttatagtcatttcttcagtccttttagaatgtcaggctacagagctgcagttattaagggacacataagggccagtgtactatttctttatactcgagtcatggcaattttccgcagcatgatggataaaaatgtgtttttcttctttggtcatgatacctacagcagggatgcccagcatcctgctgaggccatcattaacctgacttcctctacaacaggtttggccttctgtggaacacctcagctctcagggtgttcttcagcttggatgtttgccaggggaagtgggcaaacagctcatgcagagagaagagcaaacactgttaacccagaaccatctttttacatcattgagggttctgctgtctttcaatgccagtcatcagctttgtcatccgtggggtgggtaaactgaagcaggcagccactgtggggggaggggttcagtgcttacagtctctgagggaggttggtccagatactgactggtgctgccgctatagcagccagtgattagagaaattactcagcagactcttctctaagggaacattatgcacatatatacatatgtgcacatatacacatctggtggacgaatgtaaaaaagttccaacaagcaggctccaagcatttcacacatacacatacatacacagtacatacatatatacatacatacatatacacacagttgatgatgtagaaagctacagcacacagacatatatacatagatacagatttgatggatgggacaaaattccaacatactctcacacagactttacacatatacatacatgcacatacatatatatatatatatatacacacacacacacacacatacatgcgtatacatatatacacacacacacacacacacacacatttagagagttgaaggcccaaagttccaactcactctcacataaattttacatacatacatacatacatacattcattcatacatacacacacacacatagttgatggaaggaaggaacagtgttccaacaactttatttttcctttcatgacttgtatatcaagctataaaattacaatatgattgtgtactatttttcttttagtgaatgattaagaaaaacagtgtggtccatcctttcatctcagctccaaactccgtctctgtaactccttccatgggtgttttgttcccaaatctaaggaggggcatagtgtccacacttcagtcttcattctccttgagtttcatgtgtttagcaaattatatcttatatcttgggtatcctaggtttggggctaatatccacttatcagtgaatacatattgtgtgagtttctttgtgaatgtgttacctcactcaggatgatgccctccaggtccatccatttggctaggaatttcataaattcattctttttaatagctgagtagtactccattgtgtagatgtaccacattttctgtatccattcctctgttgaggggcatctaggttctttccagcttctggctattataaataaggctgctatgaacatagtggagcatgtgtccttcttacctgttggggcatcttctggatatatgcccaggagaggtattgctggatcctccggtagtactatgtccagttttctgaggaaccgccagactgatttccagagtggttgtacaagcctgcactcccaccaacaatggaggagtgatcctctttctccacatcctcgccagcatctgctgtcacctgaatttttgatcttagccattctgactggtgtgaggtggaatctcagggttgttttgatttgcatttccctgatgattaaggatgttgaacattttttcaagtgcttctctgccattcggtattcctcaggtgagaattctttgttcagttctgagccccattttttaatggggttatttgattttctgaagtccaccttcttgagttctttatatatgttggatattagtcccctatctgatttaggataggtaaagatcctttcccaatctgttggtggtctttttgtcttattgacggtgtcttttgccttgcagaaactttggagtttcattaggtcccatttgtcgattctcgatcttacagcacaagccattgctgttctgttcaggaatttttcccctgtgcccatatcttcaaggcttttccccactttctcctctataagtttcagtgtctctggttttatgtgaagttccttgatccacttagatttgaccttagtacaaggagataagtatggatcgattcgcattcttctacacgataacaaccagttgtgccagcaccaattgttgaaaatgctgtctttcttccactggatggttttagctcccttgtcgaagatcaagtgaccataggtgtgtgggttcatttctggatcttcaattctattccattggtctacttgtctgtctctataccagtaccatgcagtttttatcacaattgctctgtagtaaagctttaggtctggcatggtgattccgccagaagttcttttatccttgagaagactttttgctatcctaggttttttgttattccagacaaatttgcaaattgctccttccaattcgttgaagaattgagttggaattttgatggggattgcattgaatctgtagattgcttttggcaagatagccatttttacaatgttgatcctgccaatccatgagcatgggagatctttccatcttctgagatcttctttaatttctttcttcagagatttgaagtttttatcatacagatctttcacctccttagttagagtcacgccaagatattttatattatttgtgactattgagaagggtgttgtttccctaatttctttctcagcctgtttattctttgtatagagaaaggccattgacttgtttgagtttattttatatccagctacttcaccgaagctgtttatcaggtttaggagttctctggtagaatttttagggtcacttatatatactatcatatcatctgcaaaaagtgatattttgacttcctcttttccaatttgtatccccttgatctccttttgttgtcgaattgctctggctaatacttcaagtactatgttgaaaaggtagggagaaagtgggcagccttgtctagtccctgattttagtgggattgcttccagcttctctccatttactttgatgttggctactggtttgctgtaggctgccatagccagggatccaccccataatcagcatccaaacgctgacaccattgcatacactagcaagattttattgaaaggacgcagatgtagctgtctcttgtgagactatgccggggcccagcaaacacagaagtggatgctcacagtcagctaatggatggatcatagggctcccaatggaggagctagagaaagtaaccaaggagctaaagggatctgcaaccctataggtggaacaatattatgagctaaccagtaccccggagctcttgactctagctgcatatatatcaaaagatggcctagtcggccatcactggaaagagaggcccattggacttgcaaactttatatgccccagtacaggggaataccagggccaaaaagggggagtgggtgggcaggggagtgggggtgggtggatatgggggacttttggtatagcattggaaatgtaaatgagttaaatacctaataaaaaatggaaaaaaaaaaaaagaaaaaaaagaaaaacagtgtgttccccaatagctttatatgaaataacattatgcagtacaggtaaagaaaacaagttgttctcaagaatccacgtacattcataactaagcaacttgttataaattaacaaagtgtgagcaagcaagagagttctctcagccaatttctcttactggcaggtagaaatttgtggttacaaagaaaggattaattattttattattttactatctatcttttaaaataatcgtataataatcttaagtacaaatctaaactctaaatcagtcatatctattttaaattctcagaatgcacatctgcatatcagcaatttttattaagtcatatcaagaagttgagaacaaaaatagttataaaagggctgggagcgatgtctgagcagttaagaatgctgattactgggctggtgaggtggctcagtgggtccggagttcaaaacccagcaaccacatggaggctcacaaccatccttaacgagatctgactccgtcttctggataaataaataaatctaaaaaaaaaaaaaaaaaaaaaaaaaaaaagaattctgactactcttccagagaccctgagttcagttcccagcaaccacatggtggttcacaaccatctataatgggatctgatgccttcttcagatttgtctgaagatagctccagtgtactcatacataaaataaataagtaaatatttttttttttaaaaatcagccaggcgtggtggtgcatgcctttaatcccagcactcgggaggcagaggcaggtggatttctgagtttgatgccagcctggtctacagagtgagttccaggacagccagggctatacagagaaaccctgtctcaaaaaacaaaaacaaaagaaacaaaaaaacaaaaacaaaaaaaatggatataagaaatttatcatcaccagttcagcctcagagagagtcacgtgagctagtgctgccattgttcttgtccctgaacgtaaaagctcctcgcgtaactaataacagagttcctttctgaacttcaaattgttccccaagatgttctacatcaaagccagtagtaaaagcatctcagcccagcttcactaacattctttttccaaaagttttttaaggctggtggtcattgctcacaataggtctctaagttcttctctagtgcaatgataataatctgctccagcagcaatgcctgagagagatcaaggattagtactgtgagtgccagagatactgcccagtgaggggctggaagccccctagagttttcacataattcttagattaagagggatgtgagggcagcaagcagagcagaactgcacaacaacatgatgtcctcagaaccatgcctcaactgagagacaccgtcctggctgtgctaaccggtgagccaaattctttccatgagttctaaaaccatttattattcctcctgcgtgatcctcagcacttcaaattatcaattgtctcccaagtattagtggtactttgtgaggcttagggattagttccggggacacgtgcttgcacagaaccttgggtctggtccccagcactcaaaaaattagaatggaggaaggacctgatggaaggtaggagggagggagggagggagggagaagagaggagagagatgggagagacagagaggagagaggagagaggcgtgtggatgtgatgacttagcaccgtcaaactggggacctgaattcaacctctggtgccacatgttggttgtacagaattaattcccacaaattgtccaccacacttgtcctgtggnnnnnnnnnnnnnnnnnnnnnnnnnnnnnnnnnnnnttctgttttgttttgagatggtctcactttgtagccctgactggtctagagctcaagaaggtcagcctctgtgccccaagtgctgacttccaaactttcaaacttcattttcttagtttttcttgaaattaaaatgataccattttcttcttccctttcctttctccagaccacactcacacacctcgaattcatggcttctttttcttaaattgtacatacatatataatatattcctaaatatacaactacaacctacctgctcagtccgtataaggttcatttatgtaactgatttcagggttgactgtgtggtgttgggtaaccctttgatgtgactctgagaaggctgtctaccctgctcatcgttgcttagttgcctatagttctacctccgggttggggcactgatagcttcccactctgtgttagcatacattttggtttccttgttgttcgttggttttgtcttgtgtttcataaatattttccaatcttaagtttctccttgtctagacttaacccttgtgacttaattgttgaagaaatggtctctttgtattgcatgtttcccacagtctggagtttgccacaaactgtcctttgcttcaaggttgccagtgctaccggctgtctccaccatttcctgtgaacgggtggttgcagctagaggtttgatccgatccagagcttccttccttttcggctgtagccaatggcagcattgttgatctcttcttgcacggggactttgtgtgtgtgtgtgtctgcttggtgcacagcatgctttgcaggctttaatcttagtggaggctcagaatgctagcacgtgtcagtttatagctgatgatcacacttcttaggtccagtaatctcaaatgatttttagacaggcctcttgggtccattgtgttgcatgtgatttaattttgtggtgtgtgtgtgtgtgtgtgtgtgtgtgtgtgtgtgtgtgtgaattcacttagtgctatataaaaatgttttgcattaaaagtgcttttacaattagtaataaaactcaaaggactcagccgggcatggtggtgcccgcctttcatcccagcacttgggaggcagagacaggcggatttctgagttcaaggccagcctggtctacagagtaagttccaagacagccagggctatacagagaaatcctgtctcgaaaaaacaaaacaaaacaaaaaacaaaaaacaaaaacaaacaaacaaacaaacaaacaaacaaacccctcaaaggcctgaattatttgtactgggattcaccatctgtgaaaccccttgaggacagatgtctgaactgcagatagaaccatttccctttgtgcttgctgagttgggtgtgttttccctttgagcttgctgtctcctgctcgtgcaccatggctctttagtctctttctgctttctctgcaagctcatcctgctcacagtattctactgtttccaagtgtgagaaactggcttgggaatataaaagcaaaactagcttttcattgtgtgtgtgcatccttaatttattctgctcagttctatctgtagacctcagttctactgtttattaaatcgaaccactggaactctagatccaaaaagtaactatcaggctgtgttgaccaaccgccacgtttgaatattgaatggcttgatctatggctgatgtagaaaggcatcaacagctgagatcagatatcagagcagcgcacacaaaacattgcaaaggggagcctgttgtgtagctttgcccattggcgtgcaaggaataatttttgcttttctttctttttgtttttctttttgttgttgttttgctttgcttttcttctttgagacaggatcttatatagccttgtctggcaactcagtataactaacaatgaccttgaacctctgattctcctacctctacctcccaagtgctggaatacaggtttctaccaacatacctggataaatcttatttttacagacttgtgtacacacacacacacatacacacacacacacaccagatcaggcagggttttcctatgtagtactggctatttgggactcagggttagtgttaagaacttgctctgagccgggcatggtggcacatgcctttaatcccaacacttgggaggcagagacaggcgaatttctgagtttgaggcaggcctggtctacagagtgagttcccaggacaggcagggctacacagagnnnnnnnnnnnnnnnnnnnnnnnnnnnnnnnnnnnnnnnnnnnnnnnnnnnngttaaaggagtgtgccagcactgcctggctaaaatattaagtattactatgattattcataaagacctttaaaattctcacttgaaacagtgttttgtctgctcgcctggtctagaagtggtgttgtgctttattgagtaagtggcctgaatggcattggagatgccgaacgtacatcctgaaagggtatttgtttcccttactttcctaagacccatgttgtctgggcttcttgacaatgcactttgttctagagctgccatataaaagcttggattatacattgtgcttctccaagcaaggagaacgcccgttccagtgcggtgagtgccagcttgctgctgactgactgtcatgtgacctttgcttgcaggctcggttgtcctacatgcgggtgaagtatcttttcttttcctggctggtggtttttgtcggaagctggatcatatatgtgcagtattcaacctatacagagctatgcagagggaaggactgtaagaaaatcatagtaagtattttaaatattttagtttttttaaaaaatgtcctataacagactatagttatgataaatggcctaattattaaatgtcttcaacagtaaaggcaatttgatattacagttgtgctgaacgtcctagctttttagtaaattcagtactcagaaatctaaatatgtagtacaggtaaatcagtgtggaagcaatctcactatgaaatggtttttattttcaaatatatttgaaatttggtttattatatatcagattttaaaaatgtttagggcataagtatgttattatagattttctagaatatatatttttttaataaagagtcatatcaaacactaaactttatctaaagggtatatatttatcacttattttctctctgagtaattcagtatattttataaaaattaccttatcagtgcaagagtaatagccatatttactggctgtgagtgttgtagaacacttattttaaatccttgagtttcttaattaagtcaactccttattttctactactatctttcaacatatatcaaaacacttatttcaggaccatatatttatttttgaatttgtttgtttgtttttatgggacgctagttcaaaccaaggacctcaagcgttcaagcaggtgcttacctccaaactacacccatctctatgcaaaacatttaaagtgtgtgcgcgtgcgtgtgtgcacacgcgtgtgagtggcgctcctgctgagaccagaatagcgcatcaggtttcctagagctggagttacaggtagtccttagctgcctgatgtggatttggagaacgacactcaggtagcctgaaagcactttgggtgcagcaagcatcctttcttgctgaactacctctcatgctcaaccctgagatcttactactttcaccgcagtacatatattgaagtgttgtacattaatacagttactgagagtcaggatcttcctgattaccatgtcacgttggttcactgtcaagaacaccaggctagagacaaagtcctaggctgcggtcaccttttcataacagggctttgatttagttctagtttacaggcaagaaaaatgtttttgccctacttgccccttagcttttatgatgctgactttagccaatacgcttgggcactaactgtgatggtcctcggacatgtcagctgggtatagagtaggttcaaatgtccttgactcgatcttgtttggtctgaggcaaacagcctcatactgtcactgtagtattgtaagctgttcctgagagacagctggagaagcgccctagagcatcgtttccgctttgttaggagttagaggtgagtggtcatcactgtcatggccatgctggtttcttctctgactatctgctgtcttttacactctctattctgtgtgaggggttacatctgttgtggtgtgggtgctgaagtaaaagttcctcaggtttgaggtcagccaccttctcagtagctgtgcaagctcctgagcttctgcagaatggtgactaatgccatttccatatacttccccttctactgcgatatgattgcttgctatagccatgatttcctaattactaagtaattgcagccaatcctgtttgatgcccaactatgtagaaatcttacataattggactctgtaggtgggatctcccagacatggcctgtttcattaactggagtaggagaggtgcttctcttctgtgcacatctgaggaccacaaagttccatcggagtcctctgactgactcctctgtggggggagtctgcacttctctgaggagtgcctccgccacattttagagggctggtgtgagtgttaaagaagcataacccttgggaggcagaggcaggcagatttctgagttcaaggccagcctggtctacagagtgagttccaggacagccagggctatacagagagaaacactgtctcgaaaaaccaccaccaccaccaacaacaacaacaaaaggaaccctttaacctgaagcactaaaagatttcaggaaccctaatttaatcacagtctcctttgagattcagtttccaaggataatggtttgttacttaaaacaatcaacttaagacctactaaattgaagccattaggagctatgttcttggttagacagtaatgcatgacagtattccatttagctgtgccttgcttgggcttctttaatgtgtgaggaagaagtcaatagaggaaacactggaaaagcttaagacagagcgcagaacatggtgaagactggtaatgcctgagagagaagagggagaaaatgatgactgaagactcaaaagtttccaggaattgtgaaaaacccaactctgcctgtgtctgtctgtcagtgtgtgtctctgtatgtgtgtgtctctgtcagtgtatgtctttgtgtgtgcctgtctctgtacatctttatgtgtctgcgtgtgtctgttggtgggtgtctgtgtgtgtgccttgtggctagctttatctctctgtgtgtatatgtgtgtgggtgtctgtgtgtctgtgtggatgtctttgtgtgtatctgtggaaggtggagtgtctgtgtatatatgtgtgtgcttgtctgaatgcatatgtgtctgtgtgtacatgtgtgtgggggcaggcctgtatggttttgtgtgtgtctatatgtgtgtatacgtatgtgtgtgtgtgtctgagtgccttgtatgtgagtgtgtgtaggtgtgtctgtgtgtatgcatgtgcctgtgtcttatgtctgtgtgtctgtcagtttgtctgtgtcagtgtctgtgtgtatgtatctctgtgcttggttttttaagtcttgttaaggaaaaccagctgtctgaaaatgatatcttaagtacacttttagagcatggatttttgaaaatatttagaagccaaagtttacacatatgtttgtggttattgccctcttgtggtccagtttgtagtttagggcaggattccttcaataggagtgtgttttgtaaaaataagggtaaacagtgccctcttctggtacaatgaggtatgtgcaatcaaagctaaatgctgtttattacaatagtagtaaatcttgggcttttaattatttaaaagttacttagtatcattattgactattttgatatacagctgaacatttttatagacattacttagggtggctatagctttatgaagccaactgctcttttcacacaaatgtttgggaaatttgcctttaatttgggatagaaagccagagctattctttgtgaccacccctgtgacgcaagattagcttgaggcctttgctcacaacaagaaatctgattctcacagctgaataccagactagtcgctgcttactgatttactaataagagactttactaagaaaataaaaagaaactttcaatactgtgtactgttctgtatggtacaagggcaggggaacttcagagatgcccaagacagtctgtgcctctaaatcacctatcagtatagccaggctgcaaatgatgctggactgggggataggaggaaagaagagagggagagtaccagctcggtgtgcaatgatcgctcgagtggaaagcaaagtgttgcagagaggctgtttccaaatctctagtttaaacagtgaagtggtggtgggattcagaagctgaagtcaggtcagttgaaggaggccccagctcttctgacagaatatgctacacttagggaagactccctcagcttgtcagtttggcaggtgccttcctctgtgtttgatgatctgtcagccattgcacaaaagccctgggttagtcagccttaaacctgttctgctagctccagctcagcttgtcagcctagctggactgattctgcacaggctctggaagctgactgggcctaggctccgttttccatgcctgcaaacaaaactccatgcagcatatagagaatcgcctagacctactttctttggagcaaaagatgtttggatactgatttagtttttgttggttatgtagtgttggaatgaatcctcatacatattatgaaaacacctcactattggttaaggtagatgtgtgtgtgtgtgtgtgtgtgtgtgtgagagagagagagagagagagagagagagagagagagagagagagagagaaagttagttttcggctttttaacttcttagggtatcccaacaccacccaccttccttccttccttccttccttccttccttccttccttccttcctttatttggtttttcaagacagtttcactgtgtagctctagctgtctgtactggaactcactctgtagaacaggctggccttgaactcacagagatctacctgcctctgcatcccgagtgctgagattaaaggtgtatgtattccaggctggagagatggctcagtggttaagagcagtgactgctctaccagaggacctgagttcaattcccagcaatgacacatggtggctcacaaccatctgtaatgggatctgatgcccttggtgtgtctgaagacagcaacagtgtactcacatatataaaataaataaaatgaaaaaaatggaaaaaaaaaagctgtctcctgagaggctctaccagtgcctgacaaatacagaggtggatgatctcagccaaccattggactgaacacaagctccccaatgaaggaacttgagaaagtacccaaggagctgaaggagtttgcagccccataggaggaacaatatgaactaaccagtatccccagagctcccagggactaaaccaccaactgaagagtacacatggtgggactcatggctccagctgcagaggatggcctagtcagtcatcagtgggaggacagacccttgcccttggtcctgtgaaggctctatgccccagtgaaggggaatgccagggccaggaagtgggagtgggtgggtttgtgagcagggggagggaggagaggacagtgagtttttggaggggaaaccaggaaaggggataacatttgaaatgtgaataaagaagatatctaattaaaaaataaaggtgtgtgtcaccactacccagctttatggtagtttcttggttacttttttattgctatgatcagacacgcttatcacatgaccaagacaatttttaaaaagatttatttatttattatatgtaagtaagtacactgtagctgtctttagacactccagaagagggtgtcagatcttgttacagatggttgtgaaccaccatgtggttgctgggatttgaactcaggaccttcggaagagcagtcagtgttcttaacccctgagccatctctccagcccgaaattttttttttaaagttttgtttttcgagacagggtttctctgtatagccctggctgtcctggaactcactttgtagaccaggctggcctagaactcagaaatctacctgctctgcctcctgagtgttaggattaaaggcgtgtgccaccctgcccggctgaccaagacaatttatagaagagtttattggagcttacatttcagagggtgagtccatgaccatcatattggaaggcaggcatggtgcaagaacaggagcaggagcagagagctaactggcaatgtcatgggcttttgagctgccaaaatgcaccccgagtgacacacctccttccacaaggccatacctcctaatatttcccaaacagttccaccaactgagggcccagtgttcaaagatacgagtcttcgtggacaggtggcatgggtttcgttatagcgtctgcacacatgtgtcatgctttgtgctacttcgttctgctcagtacctcttcatgcttccttcttcagcagttccttttttttctctcagttctgatttaattatataaagtattctcgagtatccaggtaagtcgtccctataatgctagcacttgggaggccaactcaggaagatttccacatatgcaagcctaggtcccgagttccagcccagcctggattacagggtgacatcctatctgggacattttttttaatgatctgttaaccttgttcagcctggctgcttcttcaggcattattgttgttatttgtacttttctagaaaattgctcatttaaatatattgccataaagtcatttgtgtttttcacagtcactgcccagtggctgcctgttagtgctttgttttgctttcagnnnnnnnnnnnnnnnnnnnntgagtttttggaggggaaaccaggaaaggggataacatttgaaatgtgaataataaagaaaatatctaattaaaaaataaaggtgtgtgtcaccactacccagctttatggtagtttcttggttacttttttattgctatgatcagacacgcttatcacatgaccaagacaatttttttttaagttttgtttttttgagacagggtttctctggatagccctggctgtcctggaactcactttgtaaaccaggctggcctcgaactcagaaatctacctgcctctgcctcccaagtgctgggattaaaggcatgtgccaccatgcccggctgaccaagacaatttatagaagagtttattggagcttacatttcagagggtgaccatcatattggaaggcagccatggttgcaagaacaggaacaggagcagagagctaactgggaatgtcatgggcttttgagctgccaaaatgcaccccgagtgacacacctccttccacaaggccatacctcctaatatttcccaaacagtttcaccaactgagggcccagtgttcaaagatatgagtcttcgtggacaggtggcatgggtttccttatagcgtctgcacacatgtgtcatgctttgtgctacttcgttctgctcagtacctcttcatgcttccttcttcagcagttccttttttttctctcagttctgatttaattatataaagtattctcgagtatccaggtaagtcgtccctataatgctagcacttgggaggccaactcaggaagatttccacatatgcaagcctaggtcccgagttccagcccagcctggattacagggtgacatcctgtctgggacattttttttaatgatctgttaaccttgttcagcctggctgcttcttcaggcattattgttgttatttgtacttttctagaaaattgctcatttaaatatattgccataaagtcatttgtgtttttcacagtcactgcccagtggctgcctgttagtgnnnnnnnnnnnnnnnnnnnnccttccacaaggccatacctcctaatatttcccaaacagttccaccaactgagggcccagtgttcaaagatacgagtcttcgtggacaggtggcatgggtttcgttatagcgtctgcacacatgtgtcatgctttgtgctacttcgttctgctcagtacctcttcatgcttccttcttcagcagttccttttttttctctcagttctgatttaattatataaagtattctcgagtatccaggtaagtcgtccctataatgctagcacttgggaggccaactcaggaagatttccacatatgcaagcctaggtcccgagttccagcccagcctggattacagggtgacatcctatctgggacattttttttaatgatctgttaaccttgttcagcctggctgcttcttcaggcattattgttgttatttgtacttttctagaaaattgctcatttaaatatattgccataaagtcatttgtgtttttcacagtcactgcccagtggctgcctgttagtgcttggttttgctttcagtcttcctaagggctcctttttgttaagattatgaggaaggatctttggatatttcattgctgacttctttgctcccatgcctctctatcttgaggaattgactgtactgtcattagtgctgaggttttgtttttacttagtttaagctttaagtttgagcctatgtagtgctccgtgtgctttcttattcttttcagccttgcatttagagctataaattcccctctgagagatgtggcacctgtatcctacaagttttaattgttgttgcattctaaatattttgtattttcattttctagtttactttaaaatttccttttagattcttcctgttcctccctcctcctcctcttcttccttctcctcctctttaaaaatggagtctcattctagcccaggctggtccagaggtcatcttgtagctcagaccactctaatgaatgctcactctgaatgcccagcctccttttcttcctacatagactttcagtaaattttattttcatctttttttgaggaggtggggggcgttggtctatatttgagctgtggaacttcaatgacatttgttttccttccaatctatttattgattcttggtcagagaatatgtggtctgcatggtttaaatccctcactggacagtccctgtaggaggctgcactccagtgtgaagctcagggctcccaccacctttgccaagcagatgcaccatgcagatgcctgcatttcctaagaaatctcacaaagggaaggcattgagcatcactgcaccctcatggcctcccagacatacggtagggaccagattgccttactccttgtatgaagatggaactctacatctctagttacagccagagctaaaggagaaagcagggcatagtccaaggcttgtctcaaaaccttttgctattggcagctaaaggcgcttctccaggtagtagcactttactctgcatgagggaagggctctcagccctcctcaggaccatccttatcttcacaggaaactgcaccgagtgctgttagtagtgagagcaggtgtcaggagcctggaacatgtatgtacatgtatgtacaggagcggttgggatcctggctttttaacttacacttgtgtttccttaggtttacagtggaagtggcagtaattaggttctgtgacagaattgtcaagacaatagatgattgcagccctagggcagtgcctatcacactgaggacacacaggcacggcagtactgcatcagcagttcccaagtcagtgccaagggtgttctcaccccagacctgctccccagctgcccaccattcatatacatccatacccacagtccagtaacttcaaggcacctgtcacaagagtcattcacatcggccctccttaggatatatacccttcctgtctgcaggttaaagtgaagcttttaaaatctatgttgagcagggcagtggtggcacacgcctttaaacccagcacttgggaggcagaggcaggcagatttctgagttcaaggccagcctggtctacagagtgagttccaggacagccagggctatacagagaaactctgtctcgaaaaaacaaaaacaaacaaaacaaaaccaaaaaaatctatgttgaaatattttttcttttccactgttcttgacagctctctgtcagggtgggtaacagtatacccagaaaaaaacagctttcaggaagaaaagttcatgtggctcgtgccacgggcttcgtgcctagctagatccactgctgtacgtctgacacaggcagaatattacggtggccggagcctgtggtgaaggaggctccacagatgccaggaagcaaaggctgaagagaaggaagggtagagagcagaagatccttcacaggttctacccagcggcccctgttacagctcagctctactttctgacactgacgccacctcccagctggagaccagggctttcagtgcacgagccgttgggggggtgggtcggtccagttgcaagctctaacatgtggactgctgtgcacccttttttttttttttttttttttttttttaatgagacagggttttctgtgtagccctgactgttctggaactcactctttagcccaggctggcctcaaactcacagagatccacctgcccctgcctcccgagtattgggattaaaggcgtgtgccaccacagccagcatgctctacatctttggtctttcatatcatctacagatttatctcaaattctttttaatttttttcagtccctatttttctcagtttttttcaatatagtatcttaggtcttcctgtatttttacccttgtttatcctttctcccacagtacctttaaaaaaaaataggtatgtgtgcctgcttgtttgaataccatgagccttcagtggaagctagagaggatgtcaggtccccacaattgcagtttatttacggctgtgagccaccccgtgggtcctgggaactgaacccagctcctctataggaacagcaaatactcttaaacactgagccatctcgccagtccccataatgtggctttttatttctaggtttttgtcccttttctttctaagttccattagcttgttttacatttcctctgtttttcgttgtttctgatgctttgcagtcttttttaagggatgtcaggaaagcctttgaattcacagcactctttctgttctgcttcttcccagcagttcccgggatattgtctttatttgatatttgcttctcatattcctttcataaacagtcaggcagtaaaccaagctagaagtgaagttgatgtgcgtgtgcctatgtgcattgtgtatgagaaggagagagaactgaggcagggcggcagattggctgtcctggggacccctgcaggctgctgatcacagcccctcccactccaagccacccactgtctgtccccaacaaagtaacagtttaaggattttgctgttcagccctgcattgatgaagccaaacagaattctgggaaattcccacagctgtgtcccttaaacctttcaatggttttgtttctgagctgcaccttctacttggtgccttgccgacttagtctgatgtctcagtgggaatttaatctcaactatttctgggctctgacataatctttgaattatgtagatgactattattattattattattattattattattattattattattatagtagtagtagtagatcatactcatttcttgtccattaatatacttttgtttgttttgaggcagggccttgttgtagcctaagactgtcatcagactcaagatcctcctgccttagacacatgagtgctaggaatagaggcacatactaccacacctagatttgaacgtaattttatcaaacatagagtggatgtttcttttctcatttttttcttgtttttatatgacttcaaggatgacaaaatgaccaaggtaatgttattttgttactttaaacttttaaatttaattaaaattcagaaccatttttaaaaatatagtacttttcttttggaaggagtaataaccgtactgtctcagaccatgttaagtggagaagaatgcttccaaaattctgtgtataccccagaagcaaagcacgcttttcacagagcaagaaaataacagagcttgggttaaaatccaggtctgtgtaaatgcaaagcctgagttcctctcatcagaaagaatcaatcaatcaatcaatcatcaatccatatctctctctctctctctctctctctctctctctctctctctgcctctgcccccctagtgctaggattaaagccgtgtgccaccttgtggcttgagaactttctcttacagaaagtaactattagttactcagacccttgagatatttctattcatgaacatttactaccttcttgtttcctgattctcagtgtgacaaatacaagaccggagttattgacggacctgcatgcaacagcctctgtgtcacagaaacactgtactttggaaaatgtctgtccaacaagcccagcaaccaggtatggatctgaccgttgtcatcatcattcattattggttttttgctacagtcttatgtaggtcagactggcctctctctctctctctctctctctctctctgtggctgtagattttcttaattattctgtctctatcttctaagagctgtgtttatagtattgctctactttacctggctagtaaattctaattttcctttaaactaaaagcattattaaaaaattcttgaagcttggaggctagagagatggctcagcagttaagagcactgactgctcttccagaggtcctgagttcaattcctagcaactacatgatagcttacaaccatttgtaatgtaatctgataccaccttctagtatgtcttaagtcagctaccgtgtactcatatatgttaaataaatatatattttttaaattcttgaagctgaggagtacttatatcaggagactggagcaggaggattttgagtttgaagccagctttatacaaatagcaaattccgggtaaaccaggaatgtgtgtgtggtgtgtgtgtgtgtgtgtgtgtgtgtgtgtgtgtgtgtgtgtgtgtgtgtgtgtgtggtgtgtgtgtgtgtgtgtctgtgtgtgtgtgtctgtgtgtgtgtgtctctgtgtgtctgtgtctctgtgtgtctgtgtctctgtgtgtgtgtgtctgtacacatcctcccaaatatgcataactaaaaattcttgaatcaaacaaagctttaggaattttatgcatttccattttgtaaggtttgatacatattcactaagtaggtatttattaagcaaggcatgtggtgcatgcttataatcagagcatttgggagactgaggcagagaatcattgcaaatttagtgtcagcctgggctactcagtgagttcaaggtaatcctgacctacctagaaagacactgactcaaacaagataaaacaaaagatttttttaaagatttatttattttatttatatgagtatacactgtagttgtacagatggttgtgagccttcatgtgattgttgggaattgaacttaggacctctgcttgctctggccaaccccacttgctccagcccaaagatttatttattattataagctcactgtagctgtcttcaaacgcaccagaagagggtatcagatctcattatgggtggttttgagccaccatgtgattgctgggatttgaactcagtacctttggaagagcagtcggtgttcttacccactgaaccatctcaccagcccaaaacaaaggtttcttaatccactttccctaacatttagacactgtctgagccatgaagactgttttgttaagaaaactattcccaccccaaatggaggagtgaggtagaggaggaagagattggccatggtcaatgttcagtcctacagcttcttgtttggcatttagatacactatggcatgtgggctcctgggggactcagcaggcccagcagggacacttactgctctgctgtctgtaagttcctcacacattccttatcttcacatccatcctctttgagtttccattgtaatgttgactttacaccaagctcatcacccatttaggggctgtttgtggggaactcagccttgcataaaatgtagtaaatattgcataatgttaatttgataagtacctacttaatgtctatgatttgccaccagcctgaatgaacagcttagagaccctaagtcttagctgcacaaaaaacattgcacaaaaacacaaaatttcccccctgaaatagggaccagagaagtagctcatagtgggccttgcttttggctaggatccttccaattttacttttaaaaaactgtatttagagcccggtagtggtggcgcatgtctttcattccagcacttaggaggcagaggcaggcggatttctgagttcaaggccagactggcctaagttccaggacagtcagggctatacagagaaaccctgccttgaaaaacaaaacaaaacaaaacaaaacaaaacaaaacaaaacaaaacaaaaacaaccaaaaccaaaaaaactgtacttaggtatgcattatgttcatctttttcttttaattatttattttatgtatatgagtacactgttgctgtcttcagacacatcagaagagggcatcggatatcattacagatggttgtgagccaccacgtggttgctgggaattgaactcaggaagagcagtcagtgctttaaccactaagccatctctcaaccctatgttcatcttttaaaagtcatttaaggaaaaaatactttggaaatacttcagatttgcattcagaaataaagtcaggagctgagtatgctagtgtatacccagaaggttaaggcaagaagatttgagtatgggctacacaatggactatctcaaaaaggtaaaaacaaagtcacagatctgagaggcccagtgcttgtttacattttgtagagaacctgaaaaattccgctgtgtgctttgtgcagtcgcctttcatatgatgcataacttatcactttttttcacaaagatgtatttaggagtttgggataatctaccaggtgttgtgaagtgtcaaatggaacaagctcttcatcttgattttggaactgaattggagccaagaaaagaaatagtgctatttgataaaccaaccaggggaactactgtacagaaattcaaagaaatggtgtacagtctctttaaggtgagtgtatgcaatactacacctccataggaagcttcgtccttacagagcctggcagagcctcatgttgttgacattcttttacttccatcagagactctatctggaataaatgattcagagaaagggaaaaattggaggatattaacctttttttttttttttttcgagacagggtttctctgtatagccctggctgtcctggaactcactttgtagaccaggctggcctctaactcagaaatccgcctgcctctgcctcctgagtgctgggattaaaggtgtgtgccaccaccacccggcaatattaagctttcttatttaaaatatttcataaaattgaggggtattagattgctgtacgttttgacattcagctgatgcagagccaggcacgatgtcttactgctgttatctcagctgcttcgaagaccaaagcaggagagttgcctcaagtttgagaccatatagtgagttacaggtcagcctggactacaatgtgacaccatgtgcataaataaataaatcaataaatctgaaaccaaaatagtgaaataaaatgagtctactctatatccctgggttcccatccattcccctcctcttacatggggaacaaaccaagatcactaaactttatctctagcccattcttttctcttttcttttcttttcttttcttttcttttctttcctttcctttccttttcttttcttttcttttcttttctcttttcttttctttttttttagctgattttgaaacagactaaattgatcaggctggctttgaattgggatcctcctatctcagccttctgagtagccaggattaattacagatgtgcaccattacattggacttgaaatttaaagtccattgtggtgcacacctataaccccaggacttagaaaagagaagcaagagagtcaggagtttggtttagtctttgggctacgtttgactatctcaaaagaaagaacacttaaacacccaaaaacaattagtattagaataatttactttttattctagagaaatggcttaaatttacttgccactcaagtgcattaactacaatttaatttccagaaccgacatggtagaaagagggaactgatttctacaagttgtccaccaacatccacccacacagctgatcatgtgcaccacgtgcacacagacgtccttactgttgcattgctagcactgtggtgtggcctagaacggattcttttacagatgcttttgttctctgttggactagaagttaaactcagggcctcacacatagaactctagacttggatttacctgctaaacagactggccttgaacttaggatcctaattctagtttcctctgtgtaactcaacaaattcttgtcttgacaggcaaaattaggtgaccaagggaacctctctgaattggttaatctcatcttgacagtggctgacggagacagagatggccaggtctccctaggagaagccaagtcagcatgggcacttcttcagttgaatgagtttctcctgatggtgatacttcaagataaagaacacacccccaaactaatgggattctgtggtgatctctacgtgatggaaagtgttgaatatacctctctgtatggaataagtctaccatgggttatggaactttttattccatctgggttcagaaggagcatggatcaattgttcacaccatcatggcccagaaaggcaaagatagccataggacttctagaatttgtagaggatgttttccatggcccctatggaaactttctcatgtgtgacaccagtgccaaaaacctaggatataatgagaagtatgacttgaaaatggtggatatgagaaaaattgtgccagagacaaacctaaaggaacttattaaggaccgccactgtgagtctgacctggactgtgtctacggtacagactgtagaactagctgtgacctgagtacaatgaagtgcacttctgaagtaatacaaccaaacttggcaaaagcctgtcagttactcaaagactacctactgcacggtgctcccagtgaaattcgggaagaattagaaaaacagctttattcttgtattgctctcaaagtcacagcaaatcaaatggaaatggaacattctttgatattaaataacctaaaaacgttattgtggaagaaaatttcctacacaaatgactcttagttcatttggactactgccatcattgagaatctacttatgattttgagcatttaaagagtggcttctgccccccaggcctgtggagtcatcatcttaaatgcatgttgtaacaataatggcaggtgtagggccaagatgtccaaaactcatccctgcccttttacaagtccacaagtatattcactgttaactatcttgactttaaaaaaaaaaaattaatgctgtgaaaatcctcattccataaacagtgagtgttctgtagatgttagccagtcccattgccggacattgtttgcattgaagctgctgtttaaacaaggaaatttatacatgaatttactaatgttttagcatggtaaaactttgcacattaacacaaattaagaatgccacacaggtaaattcaaatgactcatttattaaaaagttcagttaatatagcatgatttactgtgtacttacacactttaacttcagatggagtcaactgtggaatggcttttagcttcggcatatattctacatgctgaagttagcatgcagttatcactgtgactgaaactcattatctttaagctctgataggttcatcttagtatcgtcacattatctttgctggggatgtaggtaagcagttaactgtttacctgacctgtgtagccccagtaccacagagcctgacactgtgaggcaaggcaaagatgataaagatgcacagcacctcagctaagactggattaagtcaggaagacaattcttgctccttctgggatgaagggctatttactaagaggcataagcacctaatgctttcccaagtgaacctgatattcaaggtttaatatttgaccctttcaagttattttcctatgtacattcatgtctggcatgtaccataaaaatgaaacgtcctagacacccccttctcctcaaaccaaatttcaccgttgttctcaaatctttaaagccatggattagcaccagttgttcacttccaagattgaccttgagatactttcttcccactaatcaatttgtttgtaataaatgtcctgatgatcatgctaattaccagatctgaaaatctgaaagataaggacacctcccaggaagactagaaacccaagaaacactcatgagatttgcaggaacccatgtaagctggtttttcctggagaaagactctcagctaggcatggtaatacttgcccttaatcccaccagtggtaggttatggtgcaacacaaaaggtaaaattaatttaattaattaaataactatctacttctttgcttttgtaatttcacactatttcctatagtctcattaataacagcttaacacagaaaaagctgcttgatcaatatgtttattgtctttatgaaaaaatcttcatagaaaactgctttagctttcagcagccctttcctgagctctgaggaagcttgccttcttttgagcaacccgatctttcttctgggcaagagacattttgggacgattccacctacaaaacaaagtaaggaataagacaggaatatctctcaagtgcagctgaaaaaaaaaatgacaaaacctttgtaattggatagattgaaaatctcattatctgaagatgtgtgtgtgtgtgtgtgtatgcatgtgtgtatattataggttttcctatatatcctttagttggctttgaacttgttgcaattgtcatgcctcaaaacctgagtacacacattaagttctaatccgggtactcaactgcaatggctatattctcattgtttacgccatcaaactcaagtctatctcagctgagcatgatggctcacactacaagcccagtattcacattgtcaggtagaggcagaaatgttatgaattcaggcaggcaaagaaaggttactctataggtagctaaaaagaaaccatgcaggactgtactgtaacagaatgggcacctcagtagcttctgaggttggcacattgctgtcaccacaattactctagcaaacctggttccctcagctgctgccacattatgcagagctagtgatcgagtttgctcaagtgcacagaaatctgaccagcaagatgcagcgggtttctttcctagagaattgtaaaccacccacctcttcttcttcacttctctcttgggcttcttctcatagactggattctctcggatagcagcatgagctttcttatacatctcctccatctggaagaaagcaaagcaaacagtatttgccttcatttcatgtgccctaaaggtacagtaccacctgcattcagttctcaaaggatcctaactaagccaatattacctccttatatccccaagtgcagcccacccttatccttacatctcactgtttaggatgaacacctgcatgctttcctgagaactacaagcccatttttgtacaactataccatactctgtagtctactgcctcacctaaattctttcaaaagaaggtgtacacctaaaagatgtgaactatacagggataaagacacactaacaagtgagagcaagggcatgaggagggggttatcctaccaaactaggtaacaatttttttatcatcccaaatatccaaatttatattccctcttatgtgacaggccttttaagccagcaccagagacatactataccgttgccaattttagtacgtggtagctatcttattagatttcattactggaacctttgattcaagtttgttttaaaaaattaaattcaatgtggtggtgtacgcctttaatcccagggaggcagaggcaggcggatttctgagttcgaggccagcctggtctacagagtgagttccaggatagccagggctacacagagaaaccctgtctcgaaaaacaaaaacaaattaaatccaaggctataaacccctgaagtataataggtgctcaagaacaggaatgccaagagcttgataccctgcaagctcttattaaagtgactgtaatccagctttctaaactaattcatttcaacatggaagaggtgacaaagagaaaataatttcctcactctctcaagccagtgatcccagtactcaggagacagaatgttcttcaaccctctatcatacaacctgacaactgcaagttaaaccacccagttctttcaaacagcttcactatgtagatgaggccatggactcactcactcactctgctgagaaacattaagtctgcaggagatttcagcagctacccacaacactcctgataagtaaaagcaactacaggatggaagctcagaggctgaacacagaagctttatcccatagaaaaccctgagcctcaagctgagcaagcacagcatgaggaagtcagtacaagacccagaaagacaagaaagaagtgaagtgcacacaggaaaccatgaactgagtctcatgtaagattatgtccagaggagagcgcacagaccacagaaagtgctttccactctatacttcagagaggagactttagagttgatagattccagtatcaaactcaattacttccccaacccctacttttacaaacaactggtagagccccagaggatttcaataaactctaaactgcagtagggtatggtaactcacccctttaagtcagacggtcttttttttttttttttttttttgggtttttccagacagggtttctctgtatagccctggctgtcctgggactcaactctgtagaccaggctggcctcaaactcagaaatccgcctgcctctgcctcccaagtgctgggattaaagggtcaggactgtcttaaattccatggtgaccctggttgaatatcaagtccctagacaaatccaggagaagtgaggcttgtcctccccaacctcaacccccaaagctgggtggtggtggcggcgcacaactttaatcccagcacaagcagacggatctctgatttccaaggccagcctggtctacgaagttgagttccaggatagccaaggctcctcagcaaaaccttattgcacaaatcaaaaagttaagtctcttataaagcagccattcaaaaagaaaaaaaaaaaaaaaaaggctgtactgtgacagaatgggcacctcagtagcttctgaggttggtacattgctgtcgccacaattactctagcaaacctggttcccttagctgctgccacattatgcagagctagtgatcgagtttgcagttttctgaccagcaagatacagcaggcaatgcaggaaccattcctactacagggagactttaaatgctagaagcccatatttattagcatctaaaaatcctcttcccgcctgaccaatatactaacttcactcaaaaggagcagctgcttagtagcctatctgtatctacccacaaagccacatccaaccttccagtttgcaaaataaaatcaatgttaacactacaaccactgaaataagcagtttctgtaagtgaacatcatgttcgggtaaatttttaccatgtctggagttacgttgttcttgatgtactgagagaactgtttcttatacgcatcttcatcttcctccattaggtagcgcatgtagtctgccacattctgacccatgatgtgcttccgatgtacctctgcattgaactccttgctttcagagtcataaccagggaatcgtttggtactaagatgaaaattttatgtcagtatacagacaagaaattacaacactcccaggaattcacttcaggagccgccttcagtcccgtcttgaaacaatgattacatcacatgcaatcaaaggaccaactactaactgctcagttagtgtggtgtcatcattggcagctcatctctgaattgcacagataaacgaccataaacacacttgcttttcaccttcctagagtctgctctgcccagggtgcctcagaactcctgggctctagccagcctgttgatcccaagaacccagagccaccagtgctttctttcacaggtttccttgccctgtggcacaggtggcagttcaaaagtcatcccttaagtatttatttctcagtggtagctagaatgagttagtgacgtgtctaaatcacaatcaatgaggatgttcaaaaagaaatttatgaaaatttaagttagtcaatatgctagttacaacaaaaaaatgcattaactctgaggaattacaaattaatttacttcatctctagtattcagcaatcttaatgactgaaaagcttttaaatctcaggcttttgcctctaaatgttttattctagaagcctcattttcccctaacccaaaaaatgaactttgactggcaaatgcacaggaccgggggtagtgctacacaactttaatcctagcactcgggagacagaggctggacaatcatcaccctgagttctctagtacaggttccttgtacagtaactacacagaacaggcattgaatgactgctagtcagtgagtaaccagtaggaaatagtggagtcatcacagaaatcttaaatactatctattacctatgagggatagacaagcctccatccacagctcccttcagggccccaaaaactttattgccagttgtagttcgggcaagacctgcatccagatagcaagtgaaggcaccaggctgaccgtcaatgctttccacattgtattcacctccattcacctccacttggccttcatagatcttgtccatgccaaacctattcagaagctatgaacagagaagtcaacataaacagtctcagtacagtcaagccactaaatgtacttcatgttacaacaatctcacaatttgactcctacatttcttcagtctttatataggtacctgggctttgctgcctatctaaacgacttgtctacaatatcccaagacgacaacttcccagactgataaaaccatgttccctgctgatgactttgcaagccacaagcaaatagcaggcaccttattgaagatattatatacataccctgcgggccagcagcaggccagtgcaataggctgcagcataatttgtcaggccaactttcacaccatattttggaagttcatgtgcatatgctgcacagacgatcatatccccttctatacgggcatatgcaatctgcagtgagaaaagtcaggttattaacttgttgctatcaatgctttggtacctgtcccacctaagtgcctcttaacaagctgtgatgagaagagacaactcattgaagactaatctgtatgggcatcaactacatggtggtttagggggaaaagtatggttaaaatacatatggcatgttagaactcaattataatagctctttctaaatactgaaggcattatttatggtgggtgagttggtgaaatcataggtgcctttagaagtcaacaaactgggcaggagatgatctcagactagatcctgagctcatggctatattgcaagattctttcaaggctggcctggtctacaaagaattacaggtcagccagggtcatacagtaggaccccatctcaaaaaagggcacctttaatcctagccctggggaggtagaggcaggcagagctttaaattcaaggccagcctggtctacaggcaacagccaaggttaactaaataaagatccaccaccaccaaagtcaggtctcacttacttaaaagtatcttttgagctaaatttaaccaagtcttagacacttcatccttaattatcagaacaccagacaaccccaccttcagttaacaaagtcacaaaaggcaagtgcacctatctcctgaccagcaaatttttattgtaaaagccctgaatacagggactgccatttttaaagggctttcaaagtggaagacatttttgtgtattttaaaacctatttcaaacagtaaatagaaatagcttgtcatgctgggatgacagatgagcaaccctgcctggcaacaagagtcctaccaccctattaccagcctttttaaatcagtaaaatggcacacaagcccataaagtaagaaccaggagttaatgcgtgacagatgaaggtaattggaagactattcatatcaacagatttcccagtcctcctctcaaattccataatggaaattaagcaaagccaggatttccaaaccttccccccacccccacccccgccactgaaatctactaacacaagaaaatagtctctcccaaaagttagagttgatgcgtctgaccacactactcaagtctaggacataactcacctggcagatgatatctctgttagttacacgaactatcatcctatatttgggtgtgttgtacttattcttgtcctggatcaccaatcgttttcgagcatagtagtcagttttaccctctgcaaggggaaaaaaaaatttaaccagggaaggttccaccttgaaacagtcttcagaaactaaaacagaaaaagttcatacctcgccgccttcgaaatctcacttggtatcttttaaagtaggccttattcttgacaactttcacaaacccctttaaaggaaaaaaaaaattatcagggctttgctaattgtttcgtcccatgacttttttcttttgatacaggccaactatgtagcccaacatgacctagcatttggtagtttctgagcgccgaattaataggcaagaaccacctgggttttggtctgtatttttttatttaactatgtaacaaaatcatgcccaagtttcaaaagcaaattattacaagtgtcaacttctatagcatgtttctaagctgaccggaaacaagaatcgctgttgtgcagtgctcaacctttaataaggttagttcctcatgctgtggtgacccttccccaaaccataaatctcgttgctgcttcgttaatttaatcttgtagttattcatcgttaatacaaatatctgacagatgggttaagaaccagatggagaactgctgttgcactggttctcttcgccaaacacacctaactaagcctcagaaaacacgtaaagatggctgggcggaatagggcaccgacccaagtcgctccatccacaactgcaggctccttactacaacttgcaggtacaaagacattttcgtactgcctttaaacaatctttcaattcctgtaccactgatcgatccctacgccaaaccgccgggatgtatcacctacaccggagccaatctgtgccgacaactgcacacctcaccgagaaagttcaaccactcggcgctcacttcctccctgcctaaaccgggctcaactggcagagtacgatctacaattactcctcgcaaatgaagagctgcaccccacctctcaagtccgatctcagcaaatctctgaaaacagggccagactctggccaggaagagccaggggccgccacatcccttccgggacgcagcagcgccacggcctccactgacagacactcccggcttcagggctctgtgcgaggccgagggattcgggcttccgtggcacggcctcctgacgaccccggagacaactgcggctggcagccggactcggaagcctcgtcccgagcaccctccgccgcggcccctcccccggctggcacccggcagccattaggccacgctggaacggcgggcgcagagccgggaatcgaatgccatctgccccccgggtcgcacgagccgaccccgagcgggcatccgcgagaggagggggcaccccggtgcacgcacgggcctgagacccagatgcccactcaccatcctgcggaatagagacccgcaaccgcggctccacgcagacctgcagagtcggccgcgctaagggggaaaaagaccggagtcacgtacgcatgcgcagtatgtagcaccaccagcacgcaagcgacgtgagaaagagtggctgtaggcctcaagatgcgcgggctatcgccccctgccggtaggaggatgaatgtcatcttcctcctctcaacgagcatggaggatgggcgatgagaaagggaaatagaggctttttgcgaggacttttttttttttttttttttggggggggggtggtttttcgagatagggtttctctgtgtaaccctggctgtcctggaactcactctgtagaccaggctggtctcgaactcagaaatcagcctgcctctgcctcccaagtgctgggattaaaggcgtgtgccaccactaccgggcaggaggacatttttaaaaacacgctcggcatgcacgcacacacaccacacttatataattatttttctaagcaggagggggtaaaaattaagttaaatacatgaatttgcctatgctgaaatcttgccttctccatgacttgactcacttctggaatatatatttcggaattcccagcacacagggccgccgggaagctcagcctcagagcctcaagtttgagttagaagagactcttctgcctttgcatagcatcttgacatctgcttcaagcatacttttcattctccagcacttctcagagtgctgacctccagtcaattcttagttacctgttacatggtgaaaacaaaacaaaacccactgcactctcctgttgcctttatgcttccattgtccccagaattcctgacattatgagcgccgcctcctccatcactcttagtccccttcctcaagaagtttctttttaggactgggtgtgcagctaagaattgcagcctcagtacttagaagggagaggaaaaagaatcagaaagtgcaaggctagcctaggctacctagtgaattggaagccagcctgggctgcctgaaggaaaagaaatgcatacaaacaattatttaaacacgtgaaagaacagttataaggctgagagctttagaaagtctaaaaaaagtctgagagccgggcagtggtggtgcacgacctgggaggcagaggcaggcagatttgagtttgatgccagcctggtctacaaagtgagttccaggtcagccagggctacacagagaaatcctgtctcggaaaaccaaagtcaatgagaatgcaatttgaaaattgcttccctagccgggcgtggtggcgcacgcctttaatcccagcgctcgggaggcagaggcaggtggatttctgagtttaaggctagcctggtctacagagtgagttccaggacagccagggctacacagagaaactctgtctcaaaaaacaaaacgaaacaaaaaaaaaaaaaaaaaaagaaaagaaaagaaagaaagaaaagaaaaaacaaaacaaagttgcttccccaaattctgtgtacccaattatttttagcaatagcattttatgacactggtgctcagattttggaggggcagtggaactccttaaaaatatttgtatttttatggatagctcagcaggtaaaagtgattgctatacaaacctgatgtactgacgtcagacccccggaacccttatggaaagccaggaatggagtatgtacctgtaatcccagcattcctgtggtgagattccaggttgaagccgaatcccctagaagtgtgtgggtcagcagcagcaatcaatagaaaatgtcctacagctggatctcatgtaggcatttttctcagtggaggccacctcctctctaatgattcagatcttggagtttcccagctcccacaaggcagctcacaactttctgaaaccccaaaatctaacactcacacagacacacatctaggcagaacaccaaataaaataacacattaaataaacagacaaacaaatgataaaatgctcataataaaataataaataaaacacacatcaaataaaaataaatactttttaaaaaaaagtgtgctcagttattgtactagctggttttctgtttcaacttgacacaagttagagtcatcagagaggagttgagaaaatgcccccatgaggtccagctgtagggcattttcttggttggttgttgatggagtagggctcagctcatcctgggtggttctatccctgagctgtggtcctgggctctaaaaaaaaaaagcagcagagcaagccagtaaggagtacctcttcatggcctctgcatcagcctctgtctccaagttcctatcctgacttcctttgtggaagtgtaagctgaataaaccctttcctccccaaatggccttttggtcatgatatttcatcacagcaatagaaaccctaagtatgacaactagcatgcctcccccaacccccgccattggttctgatcataattattttatttagaaagaaaaaaattgttttggttacaggaaataaaaaattcaagctcttacaaatccagtacagaagtttaaaaatcactaatgacagcaggtagagatcattagacacacaacactgactc

SEQ ID NO: 892 - DNA, 2553 bp, Mus musculus
ggcggccgcgctcgggtccgcctccgactgcggcgcggcggggcgatgtgagtgccatggcgaggagtctctgcgcgggggcctggctgaggaaaccccattacctccagtgtgacaaatacaagaccggagttattgacggacctgcatgcaacagcctctgtgtcacagaaacactgtactttggaaaatgtctgtccaacaagcccagcaaccagatgtatttaggagtttgggataatctaccaggtgttgtgaagtgtcaaatggaacaagctcttcatcttgattttggaactgaattggagccaagaaaagaaatagtgctatttgataaaccaaccaggggaactactgtacagaaattcaaagaaatggtgtacagtctctttaaggcaaaattaggtgaccaagggaacctctctgaattggttaatctcatcttgacagtggctgacggagacagagatggccaggtctccctaggagaagccaagtcagcatgggcacttcttcagttgaatgagtttctcctgatggtgatacttcaagataaagaacacacccccaaactaatgggattctgtggtgatctctacgtgatggaaagtgttgaatatacctctctgtatggaataagtctaccatgggttatggaactttttattccatctgggttcagaaggagcatggatcaattgttcacaccatcatggcccagaaaggcaaagatagccataggacttctagaatttgtagaggatgttttccatggcccctatggaaactttctcatgtgtgacaccagtgccaaaaacctaggatataatgagaagtatgacttgaaaatggtggatatgagaaaaattgtgccagagacaaacctaaaggaacttattaaggaccgccactgtgagtctgacctggactgtgtctacggtacagactgtagaactagctgtgacctgagtacaatgaagtgcacttctgaagtaatacaaccaaacttggcaaaagcctgtcagttactcaaagactacctactgcacggtgctcccagtgaaattcgggaagaattagaaaaacagctttattcttgtattgctctcaaagtcacagcaaatcaaatggaaatggaacattctttgatattaaataacctaaaaacgttattgtggaagaaaatttcctacacaaatgactcttagttcatttggactactgccatcattgagaatctacttatgattttgagcatttaaagagtggcttctgccccccaggcctgtggagtcatcatcttaaatgcatgttgtaacaataatggcaggtgtagggccaagatgtccaaaactcatccctgcccttttacaagtccacaagtatattcactgttaactatcttgactttaaaaaaaaaaaattaatgctgtgaaaatcctcattccataaacagtgagtgttctgtagatgttagccagtcccattgccggacattgtttgcattgaagctgctgtttaaacaaggaaatttatacatgaatttactaatgttttagcatggtaaaactttgcacattaacacaaattaagaatgccacacaggtaaattcaaatgactcatttattaaaaagttcagttaatatagcatgatttactgtgtacttacacactttaacttcagatggagtcaactgtggaatggcttttagcttcggcatatattctacatgctgaagttagcatgcagttatcactgtgactgaaactcattatctttaagctctgataggttcatcttagtatcgtcacattatctttgctggggatgtaggtaagcagttaactgtttacctgacctgtgtagccccagtaccacagagcctgacactgtgaggcaaggcaaagatgataaagatgcacagcacctcagctaagactggattaagtcaggaagacaattcttgctccttctgggatgaagggctatttactaagaggcataagcacctaatgctttcccaagtgaacctgatattcaaggtttaatatttgaccctttcaagttattttcctatgtacattcatgtctggcatgtaccataaaaatgaaacgtcctagacacccccttctcctcaaaccaaatttcaccgttgttctcaaatctttaaagccatggattagcaccagttgttcacttccaagattgaccttgagatactttcttcccactaatcaatttgtttgtaataaatgtcctgatgatcatgctaattaccagatctgaaaatctgaaagataaggacacctcccaggaagactagaaacccaagaaacactcatgagatttgcaggaacccatgtaagctggtttttcctggagaaagactctcagctaggcatggtaatacttgcccttaatcccaccagtggtaggttatggtgcaacacaaaaggtaaaattaatttaattaattaaataactatctacttctttgcttttgtaatttcacactatttcctatagtctcattaataacagcttaacaca

SEQ ID NO: 893 - protein, 399 aa, Mus musculus
RPRSGPPPTAARRGDVSAMARSLCAGAWLRKPHYLQCDKYKTGVIDGPACNSLCVTETLYFGKCLSNKPSNQMYLGVWDNLPGVVKCQMEQALHLDFGTELEPRKEIVLFDKPTRGTTVQKFKEMVYSLFKAKLGDQGNLSELVNLILTVADGDRDGQVSLGEAKSAWALLQLNEFLLMVILQDKEHTPKLMGFCGDLYVMESVEYTSLYGISLPWVMELFIPSGFRRSMDQLFTPSWPRKAKIAIGLLEFVEDVFHGPYGNFLMCDTSAKNLGYNEKYDLKMVDMRKIVPETNLKELIKDRHCESDLDCVYGTDCRTSCDLSTMKCTSEVIQPNLAKACQLLKDYLLHGAPSEIREELEKQKCIALKVTANQMEMEHSLILNNLKTLLWKKISYTNDS

SEQ ID NO: 894 - DNA, 139655 bp, Homo sapiens
  misc_feature (1)...(139655): n = A, C, G or T/U
tgtgctgtgcaggcaactggaaattaaattttgccttcatacaggtggtggctatagaccctgacagtctttgaacggacttcccagttaccacctccaacctgctggcctgaatttcagagtctctccttctgaagtacttgattctgtgtcagcttgactctatccagctgctgcctaatccaacactgacaactgctttcacgaactataacctgataactggaactattttgaacgcctgttggccctatcagcatcaccaagttccagtccatcccagcggatgtgttcaatgctggttctcttctcctctctggtattagcaggccatacttggcccactctgagatgtcagatatgtgattctgtattgtataatcctacagcatcaataaatagttagattatattcattacagagtttcataaaacagagacatgggtgtcatagttcaaaaagatctctattaatgtaacaacggtcaacagttttacaagagttggtgccttaaagggactagttttgtttactaagaaaattaatttgtgtggaaaagctcatttccctataactcaaaaattaatttttacctaaagctttttgagaaggtttgttgaagatgctggctctccattgatttgttcaataacaagagtaatcaggctgggcgcggcagctcacacctttaatcccagcactttgggaggcagagagaagcggatcacctgaggtcaggagtttgagaccagcctggccagcatagtgaaaccttgtctctactaaaaatacaaaacaattagcggggcatggtggtgggcgcctgtaatcccagctactcaagaggctgagacgcgagaactgcttgaacccaggaggcagaggtagaagtgagccgagatagagcccctgcatcccagcctgggcaacagagcaagactctgtctcaaaaaaaaaaaaaacaaaacaaaacagtaatcatatatggccttatagcaggacattttagacatctttttcagacttctacttgagtccagtgcctactctgtgctaagcatcatgctgagcactttataacacataaccccatttaatctcttgttgctgaagatgaaactgaggcatagagattttaaatagctggcccaaggtcatacagctaaaaagtagcagaactaaacaaagagagcctatctgttttcagtggttcttgtagagctcctaaccactataatgcaacaaagaaacattgaaaagcaggaaaaaaactcaggaaaagatgaagaatatgctccacaagaagtttggaatccttatgacattttctgaacttgttggttctaactggattttactgggggtgatcagcaaggaaacatctgggttctctaagaacctttactgtcatctgagagaatcaaatgtttcctggacttggatggttattcttgtgctcaagaaaattggggagtgcttagggttagtcatcagaaggaagaaagcactagaaatcacccagtaaacagtgctcttgtagtgccacccggtcatctcttgctgcgttatgtttctacctgattttcctcttctgtggagaacatggcatattcttatacacaaaattaagagagtagggaaaccctattgtgaaatactattttaatattatgacattgtcatgcttgctttgacagctcatatactaaaaatggaaccatatagagaagagtatcatggcttctgcacaaggatgacatgccaattcgtgaagcattccatatttttaaaatctgtatattatgacattgacagtttatacaaaatcccagagactattgccagagactgaaaatgtcatcaaatggtctcaggacaagttcatatcctcctgaagtctaacccaccacaataaggtgactccttcagtaacttccatgtgataggtctcataagatgttcatttctgacattattgctgcagtcactgtgaattctcaacataagtcttttagtgcaacattttcattaggaggaatttcaagatccagaattaaagtgttatgccttaaatcagacaaaatcttagcaccaaattattacaggtgtttcattttcttgaagaactattccaaaaaaaacccagcacttcttcagggaatgtactgataagaataaagaacaaaataaagattgtcattcatgactgtttcagattttgaatgctgctttcaaggtaaaagctctttttaaaacctattttatttttatacttcttatcttcttggaagcctcacttattcattcattcttttattttcttaagaaatgtttatggattaccttctctaggccaactgttaaggaaataacaataaattataatttcccttcaatcattcttatcatttcccttcttatcattcttcctctttttttaaagcactgtattctatattaaaagcagatacacaaaatacctgccctactttataagtttcttttgttccatactctgaacagcattttataaaattttggacacaatagattcttaatatttggtggtagtgttagtagaaaattagggaaccactgtatttttaaattccaatgtccaatgggccttttcatagaagataaaaaagagctctgtctctcatttcagtctatgttctcatgattcaatcacaatagatttcatttttcctggggtgcaaattcagtcaccaccttggcttatcaataccctgcaccatctagtggcctgagaaggtgaatacagactacacagtatatggaaagaattcacttgtcctgttatctgaggaatttcaggtaaaacatgggttctttttaatggaatcattaatccagagcctaatctttctctattctcttcacttgctcctttcttgcttcccattctgaagcttcaaagaagctcctctttaagtgtactttcccaagtcactgctatgattttaactcagaggtcactaagtcaaatacctacagggaccagacaggaaagataaataaatgctgagggctgaagcaagaaaactaggaagtgagagggactatagcagaccgcaggacaagtgccacacagaggtcacaccagcccaccattggtgtgtgtgagaggcttggttagctgatctaattttcaaaagcgccagaaatctagatgtttatgtaaaatgtcccaatttgtaaatattggaagaaacaaaacacaatctgcccagggctgccattagcaacctgtgttctcattggtattgaattcaaagcactgaaaacaccacaggtttccgaaatgtccttgaagaatgtcagttgagttctgtgatctaaccttactgtcaaggcaaaagagaagggaaagattcttatcaggagtgtgatttgatgttggtctaattagtacattttcattagtctaattaataggtttccattctgcagttttaaaaaaatgtaataaagtgactttttttaggtaagaaagggggaatgaaacaaatatatattaaattttaaaaatacatattcaattttgcttttatttatataaaaaattggcactggaaggataaatttaaaattagtaaaagtgattacctatgaggggtaggacaaggtagaataataaaatttctcaatgactacttttaatttagtttttatttttgaaccagatgaaaatattacatattcaaaaattacaataaatttaaaaataaaaataaaaaacattaaaatcacatttttaaaattacctatcatacagagaagtacgataggttgaaaaatagagactgggcaccgtgccatgtatctgtagtcctaattactagggaggctcatatgggagggttgcttgagcccaggagttctagattatgatgagctatgatcataccacagcactccagcctaggtgacagagcaagattaaataaataaataaattagaaagcataaaaataaaaaactataacgctgtatgagggaagcagaattataaaagttcaagaagaagaaaagggaacaatgttatatttctgatagctaaataaataatcttgtaacttaaaggatgatactctttaaatggtatcaaggtgcatggtatttatatatattccactggatacacttaagagttgtgtgacagttttttgggggttttttttttttttttttagatggagtctcgctctgtcgcccaggctggtgtgcagtggtgtgatctcggctcactgcaaactccgcctcccaatttcaagcaattctctgcctcagcctcccgagtagctgggattacaggcacccgccaccacgcctagctaatttttgtattttttagtagagatggggtttcaccatcttggccaggctggtcttgaactcctgacctcgtgatccacctgcctcggcctcccaaagtgctgggattacaggcatgagccaccgcgcccagccacagttttatttttaaatgccaatatttacaacacaaaactgaaaattacttcctttacaattgtttaattttatgataaaaattttggatgttgatataaaacatcagagaattcatatctttttcaaaattcttttgagaatgtgcaaacaagaaagttcaaagaccaccgatcttgattttcctgtactggaacccactggagtaatttctttgtctctggaaggccaaagttacattacatatgatgactaagaggccacaaattagcacctctgaacataaccatatgaattagttttggattagctagcttttacttagaaaaacttaaatttttaagtgccataagaacaggcaccagcacaagtacatttggatgtttgtaaagtaggtccagtatatgacataaaggctggccaggcctctgcagtgagagttcaggagaacatcagaccagaggcagaaaggatcttgcctaaatttgccaaggccaacgtgcttggatccatcttgggactcatccaagtggatttatagccaaactgcaagttcagtggtacaagggctcaccgtacccacctgtatgcaaggtcctcaggatgggccctggagggcaagggtcctggggcatgtgaagacaagggaagcaactcaagttggaaatgaaaatcttctaaactacttttctccattcaaataaaacattaatttcatttagtcttgggtgactctaaaaggaaacccgaataaccatttcttctcatttggttcaaattttgtccttggtatccttgtttatatcttttaccgtgagaaacaccagaccaccatgcctccctcacttctcacctgaccctctcaaggctcttcacatcacctattctgaactcttctcaagactccccagtttttgaggcttttccactgtgccctctgtctatcatcagcaaaatcctctatgtcctccaacgcttctctaaatatctcctgcaccttcttgtcctaacaccaacctggctcatccctgtggatgctgttgtccctgcagccttcccagcgccctcataccactgaagtgggaggtaggagagggctcttccatgcttcttttaagatattcttcctgcttcctctctaattcctgcccctgcccattatcttaaaactcatgtcctctgatgttgtcactcaccttcctcattcctcacctactcactcacagatcactgtcttatcaaggactttagcttttgctactgacatcttccccagcacctcctgtcctaagtcttactgtttttaatacgcatgcatataatctgtatgacagtctgtccttgactctcttccaatgatcctgcctccacatcccttagccattcactgccatggtggcatcccaccctaggtttaatcactcctccatagtctcaatttcatggatcccactaaaattaccacattgttgtggtcaccctgcagaagccagatgggctcctccacctaaaatttaatttggacgttgagactgatgatgttacacttgcaccaagagggtgtgaaaaggtttattcacatactgcagctttctggggagagcagggcaggctcccaaactggttcaaaaatggcttaagggagcaaagaaaggagactatcttaggatgtcatggtggttaaggggtaggaccacggtgagggctctctcacatgggctgggtcttgcacggtttgaacttcctgctggcatcaaaggcatctaggctttcttatgtttgcacagaggaaacaggagtggcagggcttcaaagctgtcagcacatataaaaaatggagtcagacttgcaatatagatatatatttagagacagtgtctcactctgttgcccaggttggaatatatggaacgatcatggcttgttgcaacctccacctcctggtctcaagggatcctcctgcttcagcctccggagtagctgggactacaggtgcacatcacactaaagagttttgtgacagttttttggggtttttagccatgcttggctaatttttaaattttctataggaatgggatctcactatgttgctcaggctggtcttgcgctcctagcctcaaatgatcctcccgtcccagcctcccaaagtactgggtttacagacatgtgacactatgcccagcctcagactattacatacctcctatctttccagatcattctctcttttccctagactcctacaacccctcaaccccagaaggacttgcaattcattgatcctaccaccttttcactgtccttaaactctccatatccactcttccctccttaatcatcttaagttccatggtgaatcataatcatgcccttgcttatatcctcaacttccttgttctcctctccttgctcttgttcctttagtaaaatgtgattaaacagaatttcagcctactctggacctgcttcctaggagctaattattgctggagaaagaagcacactcatactaacttgtctcacttaaattcatgaccataaactgaagtgggccctacatgacactcaacaagcacacaattattctctggtccattgtcttctcattctcctagatgacatttcacaccttctcttcccttttcacataatctttcccatctcctcccagctgatagcatttctttctacatctctaagaaaattgaagcaatcagaagagaacttccaaagattcctatttaccatgcctacccacctgcctgcctgtttccatagatcaacagtctgtactcgtctacaaatgatccttccacttgtgtgttagttttcaaacgctttttccctctcaaggacaccactccagcacttctcacttcttgtttctacatgaattttcccttttcttccggatcattcccattaaaaacaagtatttctccccctaccaccttctttctctctttttttttttttttaaagaaacagggtctcactctgtcacccaggatggagtgcactgatgcgatcatagctcactacagccttgacctcctgtgcttggcctctccccattttttttcaatcttcttttgactctgcttctactgtcccagatttgggctcccctttgtaagagaacttctcaaaagaattgtttgtattagccacctccagtttctctcctctcatttttttcttaaacccactccaatcaagtttttcctctattgctccactgaagggttatcaatggcctccatgtcactaaatccaacagtcaattctcagtgctcactcgcagaggagcactccctcttcctagatccacaagcttcactcggcttcagggcacctcactcgggtctcccacttcactggctgctccctttcagtctccttggctggctcacccactaccctgtcttaaagctgcattggtccccagagctccatcctcagtcgtcttttatttacactcacttccttggtgatcttaggcagtctcatggctttaaacgccatctaaatgctgatatctctcatatacctctagcttggaccacgctccttaatcctagactcattcatacatacaactgcctaatcaagatctccacttcaatttctaatagataccttaaaatggaacttctccaaaactgaactcctcttttgcctcaaacttcctctatttgtagtcttccccatctcccttggtgttttccccataacctttattagcattcttatccaatttgattttattgattacatttattatttattgcccctctctctcacatccacaagcgcaaggatttttgtctgttttgtttatgtaaccgaaacaacttgaatggtgcctgggtactcataaatctttattaaatgaatgaatgaaaccactaggattcatccttatcttactcagaaattactgtctcttgacccaaacaaaatcaatgaaaaattggtttatctgcaagcaataaaataagaccaagtagctgtagttccagctacatgggaggatggcttcagcccaggagtttgagtccagcctaggcaacatggtaagacccctctcaaaaacagaaagaacaaccaccacaacaaaaatcacctaggtttaaaacctgtgtctgtgtgtgggttgagggaaggggcagacatgaaggtatctcttcagaacaaggcacctgaacaaggcttatgcaaaaaccaagtgagaatgagtaatggtttgcttctggggaaaccccttctcagagcaacaggccggaatgagctctaacgggccacctaaactttgttagcatcacgcttaaacgtggtaggtggggcaaaaagcagccaaaaaaaaaaaaaaaaaaaaaaaagctgcttcttccattacaagtcacttggatcaacagctgttctcccactagggtggctcttttttcccttatttggaactcattgtcaaaagaaagacaccacaccctgtgttatgtagccttaaccaagcagcaggccacgtcccaggctccctgccttcaggactgtatttaattcggtgtttttgtttttgttttcttttgaaatcagtgttcctggacggggccaggaaaactctgaagctgtcttaaaaacaatataaaccaaaaaagtcggaattttttaaaagtacatttttaaaaaaagttgtaggccgttagaggcgaactggagcgtggtaaggggggcaccgagttcagcagtggggcgccctgtccgcgttcgaagctgagcccagtcctggggggatgccccggtctgcgtctccagctgcggcagacacccccttcccccgaccgccaccaagggcgagggaggacgagccagtccccagggaaggagccccaagcttcccttgaatttcgaaacaacccgtccagacacgtcctgactccaggagaagagtccatggggagcgtcggtgctgccggggcgggtggcgggacgcgcagctgggcgcagcgcggggagccggaagccggagcagactgcgaggccagcgctgtccgggggtcgccgcatcagccagcgagaagcacgccccaatccgcgccgagcgtgcgacacccccgctgccgcggcgccccctcccgcctccgcgcgcctccccttaagctccaggcgcagtcgatttgtgtnnnnnnnnnnnnnnnnnnnnnnnnnnnnnnnnnnnnnnnnnnnnnnnnnnnnnnnnnnnnnnnnnnnnnnnnnnnnnnnnnnnnnnnnnnnnnnnnnnnnnnnnnnnnnnnnnnnnnnnnnnnnnnnnnnnnnnnnnnnnnnnnnnnnnnnnnnnnnnnnnnnnnnnnnnnnnnnnnnnnnnnnnnnnnnnnnnnnnnnnnnnnnnnnnnnnnnnnnnnnnnnnnnnnnnnnnnnnnnnnnnnnnnnnnnnnnnnnnnnnnnnnnnnnnnnnnnnnnnnnnnnnnnnnnnnnnnnnnnnnnnnnnnnnnnnnnnnnnnnnnnnngggagcccggccgccagcgctcgggtccgcctctgcctgcagcgcggcggggcgatgtgtgattaccatggcgaggagtctctgtccgggggcctggctaaggaaaccctattacctccaggtaggccggcggccgcccagccaccagctgcgggagcacccggccgtgtgccctgccgcgccgggcgggactcgcccgctcccctcctccctccctgggtctgtgcccgcccgaaccccgctgccccctgccgtccggcacctggcggcgcgccctccccagccccctcagcggctctgccgacgccccccaccgcggccctcgcggctcccgcgccgcggccagccgggctccagggcccgagtcgtcccgcccgggtacgccctcgcatcctgagagccccgagacgtgacctgggtacgaccccgcgctccgggcattgcccgcagccctgcgccgctccaggcggagctcgacgggccgccttctccctggtgttttcggggctttcccccctcccccgtgggcccccgcaggtcggttgcccttgactcagtgtcttgggtcttaagtcggtggtaggaaaggtggtgtagcattcctccgtgtcttagaaaattatgacaatttgtcacaccagtgtttccccaggctccaaaaagcagcgtgtgcctcgtgccgagccccttggttgggtcgttccatcacacccaagatttaaatgggaggtggagaccgataagcctgaaccaggcggatgggtgtttgctttttaaaggaaaggggctagtggctggtctgtggatcccaaataccctagtaatgcaaacgtaattctcagtcatgtcgtgtgtacggttcgcgtgttaatttttcatgatttcccgttccaccctctgttccgctgccagtctgtgccttggaaccctactactgcctaagtgtactgtttggtcaccagggggacctagtagacaccgcgagtagctgagcgcaaatccatcactccgatggaaaaacaactacaaatcaatgccttgcgtgggtcagcagtgttagccaacgctgcattcagaggacagtattcctttaccgcttacattaaaaggccaagaggtagatgatttggggtcagctggtgcttttataaattatgaaaaaagttgagaaggtaaccatcatgaggcaagtaaatcttacatttttgtttgaaaattgtatgtgtaagtcattaccctgaaatgagtgacgtattgcaaattggaagcatgatttgacaacccatgatattaagcgtgtacgaataaaactgagtctttgtagcaagcaccaccaatagtaattgtgcacttgagtaacactgtcacaaccccttctagaattcaacccaggccaggtacctctgtgtaatcttttatgtgagtttaaaaaaaagcttaccggccaggcgcgatggctcacacgtgtaatcccggcacttgggaggccgaggcgggctgattccttgagctctggagtttgagaccagcctgggcaacattgtgaaaccccgtctctactaaaaatacaaaaaaaaaaaaaaaaaaaaaaaaagttggttgggtgcctgtggtcccagctactccgggaggctgaagtgggagtatggcttgagccccggagcggagattgcagtgagctgagatcacgccactgcactccagcctgggcaacagagtgagaccttgcctcttaaaaacaaaaacaaaaacaaaaaaacggccaggcgcagtggctcatgcactttgggaggccgaggcgggcggatcacgaggtcaggagatcgagaccatcctggctaacacggtgaaaccccgtctctactaaaaatacaaaatattagccgggcgtggtggcgggcgcctgtagtcccagctactcgggaggctgaggcaggagaatggcgtgaacttgggaggcagagcttgtggtgagccgtgatcgtgccactgcattccagcctgggcgacagagtgcgactccgtctcaaaaaaaaaaaaaaaaaaaaagtgttttactgtggaaatttgtataccttcagaaaacagaaaacaataatgaactgtcatatgcccatcagccaccctcatcagtattttatttcatttcacctcccccactccctcttccaaccaaacttatttatttatttattcatttatttatttatttagagacgggtctccttctgttgcccaggctggagtgcagtggtgccatctgggctcactgcagcctggactttccaggctcaggtaatcctttcacctcagcctcctgagaagctgggactacaggcgcacaccaccatgcccagctaatttttttaatttttgtagacacggagtttcgccgtgttgcccaggctagtctcaaactcctgggctcaagcagtcctcctgccttgacctcccaaagtgatgggattacaggcatgagccatcaagcctggctgaaccaaagtattttaaagtaaacctcaggcatcacatcatttcatctcagtacctcaatatacatttctaatagataaagatattttcagacataatcataataccattatcatgcctaacaaagttaataacaatttatttttcccacccctttctagatatgcatcaacctgagattactaactaaatttgatttgccatggagtgagtttactgtgatttggatgggtctctctgcaaaaagcaaaacaaaaaaccctcctcttatcagctcattcatgccacaaattcttatgagggaaactagtttgatttcatgttttgaaagaatgtcttagaatacagatgtctggtttaagtaacttttcctgtgaatgaatgtattattttaatttagagtgagggtataactattcagcaggtataagagatcttgttctgtttggggggaggggaagggtaagagtacaggaagaagttggatttatttcacagatagagggaagagatggagggccaggaagaggagagaaaggttgcagagaccagctttgtatacttgcagttatgctgtttgtctttaactggatggggtcaaagaccagttatgtcctgaggtgttcaggccttaggagctgtgagttcccttttttctgcagtgtacaggagaaaacttttaagcagtcagcttacttgtaaaggaacttcattctcagtatttttattaatccagatatcactgtggcatttggtaacgcttttggaaaactgtggcattacacaattaatgatatattttcagccataatagacattcatgagctaatgcaggcacctattcactgtttatagctttgcttatatagcagaagagattctactgcctgtgaagaaaagaacttgtgtggtatatgcatacaacagaatattattcagcaataaagtgaaatgaagttctgatacacactgtaacatggatgaaccttaaaaacattaaatatatgaaactagtcacaaaagatcacgtattatttcattcatatgagatgtccagaatgggcaaatctataaagacaaaaagatagattagtggttgcctggggggaaatggggagtaactactgatggatatgaagtgttcttgagggggacagaaatgttctaaaattgatagtggtgatggttgcccaagtatgtgaatatactaaaacctactgaacgttatgctttaaatgaataaattgtaggatatgtgaattattagtatatctccataaaacagttgaaaaataaatgaaccgagtttatctcatgaaagtcgtccttcttctctctgccttttgctgcagattccaccaaggtcagctttttggtgcagggagcacttcttccaggggagctgggcaggcacactgttagtctgtgcagcctctctgtgggctagaaggacttgtgacctgcctggaagggccaacagacgtttacctgagcaacaagcttctcatggcaaggcatcttgcccagagcaagcaagctaatttacagttccatgttttccagatattttgttgaaacattacttgggaaataacacttcctggactggctaaatgatgcagcacattgaacagagtagaatcctgcctctgagatcagaaactgtggatgtattaactgcttaaaccatttttaggcagtattttcttccacgtgccattatggtgcatactacttgtggcctgcttgggtgtgataacccagaatgacacctgcatttgtctttttttagcagtgtgttttctacaaactaagatctactttgtttagggtttactcatagtctgagtgaagctgataacacagcaaccctataatttgttggttttggtttaaaataccttcttccttctcaccatcgttaagtcctgaaagaatgaaagtcaagacaattcagcataattctctgtacttagattatacacattttccattccaatcattctgcctatgtgttctgttgcatatgaaaagttggtgcagttctaatggaatttgaagtcccatgtacttgggtcctttgaaggttttcaagccgttttgcttgtaaggggcttaaagttttagaagtatcctcttgaaaatgactgccctagcaatttcagtatgtgttcagtagggttgttatgagtgaatgggtagatggcatgttctagctagggtgtttgcacttgtttaacatttctgatacctggcactttggctcgtattagtacaatttttcaaacatgactgctgtggatggtttggttccttatgagttaatgtggatattttgtgagatttagtgccagacagggttactgatacagattaattggtaatagtagtaatgttgccaaatactgtagtaaaaatgggctttttgcccattttcagtctccaggattattttaaatctaaggataattagagcctatggttgttctctatcctccaaagacaatagagggagaagatctgtagtttgtatagttctcattaactttattagacctgctgttcagagattagcttttgcctttgcctgaaatttaatctccagaactatgattagctttctgagactggtatgtgtacagagagccacttgatattaccattagttgcttttgaacctttgttagaagctcaaagaaatggtgaattctcaggcagattgcatccttaccacatttctttcaaactggaccatacagtaaaagtgtttcttcactgtagtcttctcagtgcctcagattttttttttaagttaaagatttaaaagtttttagagccattttaagttcacagcaaaattgagaggaatgcagagagatttcccatataccccttgtcctgacacatgaatagcctccctccttttcttttcttttttttccccttttcttcttttcttttctcttcttgatacaggatctccctctgtcacccaggctggagttcagtgacacaatcatggctcactgcagcctctacctcccatactcaagtgatcctactgcttcagcctcctgagtagctacaggcacatcccaccaagtccagctaatttaaatatttttttaagagacagtggtcccactgcattgcccaggctggtcttgaattcttgggctcaagtgatcctcctgccttggcctcccaaagtgctggaattataggaattaaccactgtgcctggcccctcccctattttcatttttttttcttttttctttcttttcttttctttttttttttttttgagacagagtctcactctgtcacccaggctgtagtgcagtggtgcgatctcagctcactgcaagctttgcctcccaggttcatgccattctcctgcctcagcctcccaagtagctgggactacaggtgcccgccaccactcctggctaattttttgtgtttttagcagagacggggcttcactgtgttagccaggatggtctcgatctcctgacctcgtgatctgcctgccttggcctcccaaagtgctgggattacaggcgtgagccaccgtgcccagccccctcccctatatttaacatcccccacataatggtacatgttttacagttaatgaacttacactgacgtattatcacccaaagtccatagttttacattagagttcattctttgtgttgtacattcagtgtgtttggataaatgcataatgacatgtatccatcattattgtatagagtgtagtttcactgccttaaaaatctgtgctctgcttatttatccttctgtccccactgagcccccaaaagccactggtctttattgtctccatagttttgcctttttctaaaatgtcatctagttggaatcacgtagtattttaggtagccttttcaaataggcttctttcacttagtaatatgcatttacgtctcctctatggcttttcatggcttaatagctcatttctttttaacgctgaataatatttcgttgtctgggtgtaccacagtttatccattcacttactgaagggcatcttagttgcttccagtatttggcaattatgaataaggctgctacataaacatctgtgtgcaggtttttttgtggagtgccccagtttttcatcttgatggattatagtattattttttattctccatgaaagttttctttttttgtagcagttaggtacattttattgtttttatttttaaaagttgtttctaaaagcaacactatatcatcctgttaaataccatcattttacattgtctgattgaagaggtaaggtgttgtcggctgggcacggaggctcacgtctgtaatcccagcactttgagaggctgaggcaggtggatcacttgaggtcaggagtttgagaccagtctggccaatgtggcgaaaccctgtctctactaaaagtacaaaaaatagccgggtatggtggcatgtgcctgtagtcccagctacttgggaggctgaggtgggagagcttgaacccgggagttggaggttgcagtgagccaagatcacgccactgcactccagtctgggtgacagagtgagactctgtctcaaaaaaaaaaaaaaaaaaaaaaaagaaagaaaagataaagtgttaatatttttaacatatccatttcttttatttatttatttatttttttttttgtgagacagggtcttgctttgttgcccaggctggtctcaaactcctgggttcaagtgcaccttcccaccttggacttccaaaatgctaggattatatgtatgagctactatgtctggccatattcatttctagatgttcaaatcatttgcaaataattttcctttaaaactttttaatctacgaagtatgcgagtttagaaaaccaggatattgcaatgtgcatgttttaataacccaaaatattagtaaatgaatttatctttgaaaataagcaattccttttttgttgttgattgggtatttaatgaaattaaatagttatctttcttaggtgtgatcatggaatggtggttatttttttctgtttcattttttgtttttttaaattatggtcaaaagcacataaaatttgctatcttaaccatttttaagcatatagtatagtagtattaactattttatgcactttgtgcagcaacaaagatctgtgcagcagatctctagaacttcttcatcctgcaaagtcgaaactctacccattgaacgactcctcatttcctcctgcccctggcccttggtgaccacattctgctttctgtttccattagactgctttatacttcatataagtggaatcacacagcatttgtctttttgtgactgccttatttcacttaacataatgtcacccatgtagattatgacaggatttccttcttttttaaaggtgaatagtattccattgtatgtatattccacatttcctttatccattcattagtcgatgaacatttaggttgcctctacctcttggctattgtgaattgtactacaatgaacatgggagtgcaaatatctctttgagatcttgctttcaatttttttgtatatccagaagtgggattgttggatcacatggtaattctatttttaatttttttagcaaccttcatactgttttccaaagtggctttacccttttacattcccaccaacaatacacaagggtttcaatttttccacatccccgtctgcacttcttttctttttttttttttaagagtgaccattctcacgggcgtgagctgataccttgttttagtttttattcactttcctgatgattagtggtgttgaacatcttttcatatgctttttggccatttgtatatcttctttggagaaagttccttcttgatttgttgtttcagattgatatttattcaacagggttatgtgttattgtgagcagagttcccctttcttaagaacagggtaaacatgtttgaagatattcttccaagagagattttaatgtattaacaagcttctgaattagtacatccatttcagatgtagcatagtatcagagtcatagactattattagatcttagagctagtgccacaagttttactccctgtcccccactgcttgaaaattgggactccttatttattttaaatctagaatgttgatcaggctgccatcctatgtacctttcattggatcctgtattttttttaaaaaaaaagccataaaggattttttttagattacggggaaatttgaaaatggattacatattggatagtagtattgtatcaatgttaaattgtgctgtatgggatagtgttctggttttcagaaaatataaactgtagtgtttttttcaggcaaagtcttgctttgttacccaggctggagtgcagtggcgtcatcatggctcaatggttcactgcaacctagccttcctggctcaagcgatctcccacctcagcctcccaaatagctgggcccacaggcctgtgccaccacacctggctagtttttgtattttttgtagagaccaggtttcaccatgttgcccaggctggtctcgaactcctgggctcaagcagtcggcccaccttggcctcccaaagtcctggcattacaggcgtgagccactatgcccagccaaaactaaagcctttagggtaaaaagtatcataatgtctgtaatttacttacaaatggttcaggaaaaaaatgtttgtatatacatatacagaaagcagggtttcttaatctcagcattattgatattttgggctggataattgtgtgggacttggtgttgcaggatgtttagcagcatccatgggctctacccgttagatatcagtagcattcccccagtagtgactatcagatatgtctccagacatttgtgtgtgttttttttttttttaaagagtggccattctcatgggtgtgagttggtatttcattgtagttttaatttcattttcctgatgataagttgtcctctggggggcaaaatcatctacagtttagaatgcctgatacagagaaggagagggtggggggcgggggagtatttatgtatatttaggaagagtgaaaaggcaaataaattagaacaatgttagcagttgataaatataggtaggtatagggtataagagtattcattgtattagtcttttaaattttctgtaggtttaaacattttcaaaattagtttggggaaagtaaattagactggattttatagtaattgagtatgactggaaatgtatgaactctgttcaaagttacatctcttaatagaaaaatgagatttgacagagcatatttgaagtcagtgattaaataaagagtattagttttccagtgctcctgtaacgaattaccacaaatttagtggcttaaaacaacgcccatttgtttgtaccctgatctcagagttttgttaacttagaagtcagggcacagtgtgactcagctgtttctctgctccaagtttcacaaggttgaaatcagtgtcaccagggctgagtttctttctagagttttgggaatgattcggcttccagattctttccagttgtcagaattcagttacatgtggttgcaggactgagtctccatttccttgctggctgctggctgaggattgttctcagcctctagaggccacctgcatttcatggttcatggttcatggttcatgtttccctttctccaacttcaaagccagcaactatgggtggagtcctttgtttcacatctctctgcctccctcttctgcctcatcttactaactcctctgccttcctcttctgcttttaagagctcgtatgattgcgttggatccactcagataatccaggataatctctattttaaagtcatctgagtagtaaccttagttccacttgcaaagtccctccttcacagcagtacttggattagtatttgaaataaccagagggtggaaatgttggtggatatctatagaattctgcctccacaggaagatataattgaattctaatagtaaaaaaaagtaattatttcttaaaatactttgtttctttcctattagtattaggtttaacggtggtaccaaagcaagagatttttataagagagctatgattatattaatccttctggcaataactatgaaaggagtcttggatgtttattaaaggaaggaaaatgaaaatagctgctaacaattacatttggaaatacttgtttttaccataaacactattcttttttgtttgtttgtttgagacaggctctccctctgtttcctagactggagtgcagtggcacaatcatagctcactgcagcgtcgtcccaggctcaagcaagctatcctcccgcctcccaaataacttttgaatgcatcatcgcatcttcattcttctgctgttactgtaattcacatctccttttgtctaattaggcccattgtaatagcccagtctaaccctttcagatctatcctccacattgcttccaaagtaatttgttcaggtctcccttcctgctggtgaaatccttcagtggcttcccattgcctttaggagtctatgcagagttctgagcaccgctcttcatttcttgccccttcctatattgtcgttccattcctgccactaccaccttgtgcaccatttgctctatcaatcctgaaaaacttccagtttccagacaacatgctctctctcatgtgtcaacgtgtccaccccacctttcctctttgccttagaatgtcctttccccatttgctctccatacccattcatctggtttattgtcttttttttacttgtcctttaagtctcaactcaaagaggaagtgacctttcagcagtccctccttaatactccacagtattagtgtacctcttctgtgacccaaactgcgagtgcatgatacctggcatgctcttctcttaagcacttagaagactgaaatgttgtcagtggtttccatatccttcttccatcccagactgtgatctctttgagagctaaaatgtcagttttctctgtcttttgtggctagggcagagcagatgaggaaaaaatatttgttgaatgaaatgaatcagcatacataattgtaaagatacagagttttatagaactgattagataaactaattccttatctgaaagaatgtgtacacagcaagtcaaatagtatagatgagcttatgatacaaactatgtttctccttccacttcatcctgcccctagctttattccctaaaggtagcctctctttaaccatttatatttttggatttcctggttactatgcctcttacttctatagctatatctctaaagaaaactgtacacatcctgggaggttcataagattcttaatttgagtactgaaagaaattattgctgggcacagtggctcatgcttgtaatcctagcactttgggaggccgaggcgggtagatcacctgaggtcagaagttcgagaccaacctggccaacatggtaaaaccccgtctctactaaaaatacaaaaaaattagctaggtgtggtggtgggtgcctgtaatctcagctactcagaaggctgaggcaggagaattgcttgaacccgggaggtggaggttgcagtgagctgagattgcgccattgcactccagcctgggcaacaagagcgaaactctgtctcaaaaaaaaagaattatttgaaattttatttattgtatacattttggaaagtatattaactttattaagttttttaagttccccaaatgcttcctgaaggaaggtgaagttctaattttgggggtgggagtgggagggtagagaagtgggtaagaagaatgtcaaatcgttggttctttatttgtatgctgctttaaaaaaatgaagttaactaatcccagtactttgagaggctgaagtgggtggatcacctgaggtcaggagttcgagaccagccaggccaatatggtgaaaccccatctctactaaaaatacaaaaaattagccgggtatggtggtggtcatctgtaatcccagctacttgtgaggctgaggcaggagaatcgcttgaacccgggaggtggaggttgcagtgagccaagatcgcaccattgcactccagcctgggcaacaagagtgaaactccacctcaggggggaaaaatatatatatatacacacacatatatatatatacacacacacacatatatatacatatatatgtatatatacatatatattaaatataaaaaatatatgtgtatatacatatgtgtatatatacatatacatgtatatatacacatatgtatatatacgtatatatattaaatacaaaaaaatataaaataaatatatatatatgaatatgaagttaactaccttttagctgggtgtggtggctcatgcctgtaatcccagcactttgggaggctgaggcaagaggatcacttgagctcaagagttcgagaccagcctgggcaacataatgagaacccgtctctattttttaaagaaaaaagttaattacctttttaaaaaagtttttaaaaattatttttagttgacacataattgtacatatttatggggtacaatgtgatatttcaatacatgttccattcctgccaccaccacctcatgtaccatttgctctagcaatcctgaaaaacttccagttttccagacaacatgctgtctcatgtgtcaacatgtctaccctacctttcctctttgccttggaatgtccctcccactttctgtcagctacacttttacttttatactgccaaagttgataacatttatattttttcctattgtacaaccaagtctccatgtaagtataatgatcaaatcaggataattagcacgtctatccccttaaacttttatcatttctttaaactgggaacatacaaaatcctctcctagctatttgaaaatatgcaataaattattgttaactagagtcactctacagtgctgtagaatactagaacttattcctcctatctagctgcacttttgtgtcggttaaccaatctttagctattcctctgtcccccgtaccttttcctacctctggtaaccaccattctactatctatttctatgagatcaactgttttagtttccacatatgagtgaaaacatgtggtatttatcttgctgcgcctggcttgtttcacttaacatactgtcctgcaggctcatccatattgccgtgaaagacaagatttcattgttttctgtggctgaatagtattccattactttgattgattccctatcttggctattgtgaatcatgctgcagtaaacatggaagtacagctgtctctccatactgatttcctttcctttggataaatacccagtagtgggattgctgcattatatggtaattctgtttgtagtttttttgaagaacctccataatctttcccataatggctgtactaatttatattcccaccaactgtgtataagagttcccttttctctgcatctttgccagtatttgttattttttgtctttttggtaatagccattctaactggggtgagatgatagctcattgtagttttgatttgcatttccctgatgattttcttatccttgttttgaccatttgtatgtcttcttttgagaaatgtctgttcagatcatttgcccagcttatatacttttaaaaaatatcttaaaatgtttatttttgtataagaataactgatgattttctgtattttgatgtattattataagtatttccccgccttgaaaaatgcattcaaaattattcttacatacttaaaacttttatttttgtgtaagttactatatacatataatagatgagtatagtcgtagttttacatagaatagaaataactaaatataattatatcagggatttgtgcttattactattttcctgaaaggattgcattatcaaaaaaatttggagatcactgctctacataatagacttttatgtctgtgtggttttttttttttttttttgagacagggtctcactctgtcacccaggctggagtacagtggcacagtctcagctcactgccgcttcaacatcgcaggctcgggagatcctcccacctcagcctcccaagtagttgggaccatagacaagtgccaccaggcttggccaatttttgtatttttttatagaggcagggtttcaccatgttgcccaggctgatctcaaactcctgggctcaagcaatctgcctgcctcagcccccaaagtactgggactacaggcatgagccatcgggcccagcctacctctgtttcttgatttatcaagtttagttaatatttgctaacttggtgttaaaaaatgaatatttagttttctcacatcattatccctctccattgtttgatagttgtaattttaatttaacttattctgttgcttaacttggtaacctcagaaataacaactgtttcttattttatccgcttttgacagtctttcttgactctccccttttttagaagggacatgagaacatgtgctcctttttctacctgttttttcctctcttctacttcccactttctgtcagctacttttaattttacactgccaaagttgataacatttatattttttccttttatacaaccaagtctccatataagttgaattttgaatatgagaactataaataatattatattattatgacttgttaattcttccataaaggaaaatctcccttataaacctgaaacccattgtctgcagcttatagttattttccttttattataggaagcacgtagaattaacagacctcaacaattgccccttgttatttagcacattactacaaggatttgtcccttcccagaagctagaccatatttctgccaatagggaaaagaacatgtgatgtttgtaaattccctattaaaaagtcccttgtatttagaaatcatgcttgtttgctttttgacgtttctattaaaaaataataattaaaacctagcctttgggatccctaatgaagtaacagaattatgatttgaaatcactgtccatcggccacagtttctcccctgaacagtcaatatgcagtatttgtcttttgcaataattacctggttacacttagctgcagaaagtggacatttcttctgtcatccgctccccaaatccaagtgaactgagcttcttctggagttctggaccattcaaataatgaaaatgactctcaccttcagggagttaattgcaggaaggaactaggtatcatttgattctgtgtttatagaaaatagaaaaggagtgagatacttttggccactctttctcttaggatcctgaagtttatgtcttgagaccaaatacatcaaagttagttcttgcctaagatgaaagacatttctaattttagtaccccctaaaatatgattctataaatattatttagtgcagagccaactctatgttaggactactttttcttcttgctggggccagggtaatgaccctgggctctcaaaacttcaacattaatagtaactggatcctcttttctcacactctatcagttccttgtaatcagggtacatacaagcttgtttcctgtttgaaatgtagctttttaatgctatttgtcttttttccttcctttttaaaaatttttgcagggagtttctaattgccttctttttctggcaccatcttcctttatcatagccttattttttctgtactctcacttatatttcatattctgtggtgaaatccttcttttttttcttcttaccagaaacctccctcctccatgcttgcgttcccatggtgaccggatgcttttctaggcctactacacaactggcttcctaggatttccctctcttcttctcattggttggtgtcactgttctcaggaccctaagtctttccttgtcctaatctgtgccatcttcttctttggcaaggatgtgtgggaagtaaacttttcgagtgctttcatgtctaaaactgtctttggccaggcacagtggctcacccctgtgatcccagcactttaggagcgcaaagcaggaggatcacttgagcccaggagtttcagccagcctgtggggttttgccatgttgcccaggctggtctcaaattcctgggttcaagtgatcctaatacaaaaattagctgtgctcccagctacttgggaggctaaggtggaagaatcccgtgaacccaggaggtggaagctgcagtgagccaagatcgcaccactgcactccagcctgggtgacagagtgagaccttgtctcagaaaaacaaaacaaaacaaaaactgcctttattgtaccctggtacttgttcgtagttgggctcagtgtagaattctgggccaaaaataatcttctcagaaaatttgcagatgcagctgctttgacttctgatatcccctgttgctgacaagaagctagtttgattatcaatcctttgtgggtgacctgtttttcctgttcaggatctctgttttatatttttattttgaagtttccagagaaaatgtataaatagggttcttttatcagttgtatgggtactcactgagccctttgaatcttaagacttggatcctttctcagctctgggaaattatattatttgttgaatagtttctcccttctttttcctctgtttcttccttctagagctcttcctagtcaaatggtggagctattggattggttctttatgtcttttctagcttctctattatttttatcttttattcatgtactttcattgttgagtttctcaattttattttccagatcgtttgttgattttctttccttttctaaccactttttaaactctaaggatcttatatttaatttaaaagttatttgtttctttttatggtttcctattcatagtttatgtggatgcaccatcctcttcagtattttgattataacaattttattttttaatgttttcttatgctctgtaattgtcttcattcctttcagagattttattttctatatgtttatcttagctcttctttttcatgctgctggactttctcatgtgcttggtgattgttggttgtctgttcatattttagaaagaaggactaggtaactggtgtggctttcctctgctgttttaaaagttagtctgttttcccattagacctatcaccggaatggatgcctgactgagccctgtatgtaggatgggatgccttggctggcctgtttgctctaggttgagcctatgctgggctctggggtccctcgtgccagcggagtactttactcttgttggactatacatacccacactagaagccttggctttctgcagtttgttctttcagctatctggtttttcgagtaagggttaatgctaggctgcctatgatctctgtggggtgggggaggtggttgggggtgccaaccagtgcagttccaggtacagatcttcaattattcccaccgtcttcaacctcacttctcactcctgccctcccttgtacctgttggctcggagcccagagccatcaggtgttccaactgacagattggctctctagattccctctagcattccaagaagcagtttggcttccagctccttttaggttgcctggtagagtattctgggctgtggctttctctgcctgcctcatccatcaacacaattccatttgctttttgaaactagaaatgtgttggatcttttatccgctggtgaatttcctacttttctttctttctttgtttctttcagctgttagagatttattgcttcttttgccttccttatttgagtgtggttttgcaagctgtaagtagcaaacatgtatctttagtctaccatcttaaactgaaagtcctgatgtgaattttaaactgcagcatctgttttctaatatttacctaccctatttatcttcatgactgcagtgtctatttaagcattacataattaacaaattagctgggcgcagtggcccaggcctgtattcccaacactttgggaggccgaggcgggcgaatcatgaggtcaggagttcgagaccagcctgaccaacatggtgaaaccccgtctctactaaaaatacaaaaaattagctgggcgtggtggcgggcgcctgtaatcccagctactcgggagtctgaggcaggagaatcacttgaactcaggaaggaggcagaggttgcagtcagccaagatcgcgccactgcactccagcctgggtgacagtgctagactctgtctcaaaaataaataaaaataaaaaacctaattaacaaagtatttcaataaaataaggcgagataattagagtaaataacttgagaggaataaaaataagatggaacttttttccccagaaaatcttgtatacagttcattttgataaaaaagaaaaagaaaaaaaaactgctaaaagattagcgtcttaaattagaatcaattttgtggttgagttcaatgggttttaagtaaacaatatcctttccactttactcataatgctgttcatacttggttttgataatgcttttgtcctataaaagatctttatattaatgtaatgaattgcttaaacatttcaccagcttttaaatagcaatttggtaaaatagaaagactcatgagataatttattcccccaggacagagaagggataaacaagccttttcagtctgtgatagcagaatggtttggtgaatttaaaagccttaattattatgctttaagcaacaacttaatttgcttctgtctgattcttagtttttgagttcttcctttcataaactgtatcatgttgctattttgctgctcatcattttgctgtttctcttttcctcatcaaaaagtatttactgctcatgtccatatattccctgtgctggcggtgttgctgtgggctgtagatgcacactggcttttttttttttttgagacagagtctccctctgtcacccaggctggagtgcaatggtgtgatctcagctcactgcaacctccgcctcctgggttcaagcaattctcttgcctcagcctcctgagtagctgggattacaagcacgcgccaccactcttggcttttatctgtacatttgagtgcacttttcgagtatagagtgtggatagttaagggaatcaatttctagatttttgaattcccgatgtagtttttcctaacattgctctgccagagaatgtgtttggaatggaggtgtgtgctctgctttcccaccttcacttgcgtcgttatcctttctcacttttagaaaggaaaggcacactgctaatccattttagatattacaaaggtccattgccctggatgtaaaaactaccaggacaccaaacaaagggcaattgaaaatttggtgtctgtgttaagatagtgaatgtcgagaaatactgtctcagggaatgactagataacagttttttgcaatattagtttccaatattttgctgtcaacagaactgaaagaaggcctgatagagttgtctgctaagtaactaatagatcagtaagtatatttttgatggtaggttactgttatttttgtcacataactcaaaagatttccaagaattgagagataattgctacaacaagacttccatttttatcttttcatttatgtgaaaaaagtttctcaccacttaaagttataaaaacaaaaaatagggataattctgttttttaatagctgagtcctatttcattctggcaagaaataatagttactgcacgttcttagatgacaccaaaagcatggttcataaaggaaaaattgataaatttgatcttatcaaaattaaaatctttttctctgctaaagaccctgttaaaaagatgaaaagacaagctacagactgggagaaaatatttgcaaatcacaaagaactctcaaaactcagttttaaaaaatagtccagttagaaagtgggaaaaagacacgcatagacattttaccaaagctatatagatggcaagtaaacacagatgaagacattcaagcttattaaccattagggaattgcacattaaaaccgtgatgagatatcatcagaatgactaaaattaaaaatagtgaaaacaccaaatgctggcaaggacgcagagcaactggatgattcatacattgatgtaaaatgatacagccatggaaagcagtttgcaactatttaaacttatggtgaaaaattgtagatgtcaacttaaaaatatgcaagggggtatatagttttcaaattatttgtgggatccacaaacaaaaatgctagagtttaaaaccataatacctccattgctgaaagggctacattccaaaagaatgccttttaagaaatcagaatcttaaatatcagaggtagttgaaatattaaggaacttggcatttgtctgttaaggggtagaattgtagtaccaaaagtcccttaattaaatgataatcacataaaatatggcactagtaagagtaagaaaaagaagtgttgtactatgttaagatgatgttattggctttaaatgcctatttttaaatcaaggtcaagggatgtgctcggacagatgtgttcaatagccatgttctaaacaggcaagagagaaaaaggaaaggcaagtcaggggagagttgtgtttttagcagtctgtgttgggtagggcagagtgatgtcggacactcatctctactcccagaaatcaccctgaaaggactacatcaggtttacctttaggtaatgcatgatttcagatttcctatttctagctccccatgtatggaaaatctctatatatgcttgatgatgctgtcccagtcttcttaaatgggggattaagccttccatttcaccattagccagcttaatatacaggtacttaaaggattagttatagtataaatgaatttcagtcatttgataaatatagttttttttttttgagacagggtctcactctgtcgcctaggctggagtgcagtggcgtgatctcaactcacggcaacctcttcctcccgggttcaagtgattctcctgcctcagcctcctcagtagctgggattacaggcatgggccaccactggctaatttttgtgttttttgttagaaacagggtttcactatgttggccaggctggtcttaaattcctgacctcaagtgatcttcctgccttggcctcccaaagtgctgggattacaagcatgagctactgcttccagccctgataaatgtaaattttctatgatcattttttagttgacagagaagaatgtgggaggaaaggggtatcattgggtggaagggggcatatgggaaggtggggaagcagagggttaagctttgaagtctacaaatagaagcagaagtgaggtattttagtcttgctaatgtattacttcacatgatttaggaatgttttggttaatttttaaaaatactgctgactgctctattaagaaatttgtatccctgaagattaattaacctaaaatatatcctattaaattagactaatgcaaaaatggcctatagctagatctacccagtgaatgtaaaagtcattcggttatgtagacttccctccccaaaggtgatagaaattcagtgtacaaaatgatagtatttggttataaatgtcttatgtagcaagtatttttattgaagtaattttgaatttaaagaaaaatggaaggccaggcgtggtgactcacacctgtaatcccagcactttgagaggccgaggtgggcagatcacctgaggtcaggagttcgagaccagtctgtccaacatggtgaagccccgtctctgctaaaaatacgaaaaattagccaggcgtggtggcgggcgcctgtaatcccagctacttgtgaggctgaggcaggagaatcacttaaatccgagatgcagaggttgcagtgagccgagatcacaccactgcctccagcctgggtgacagagcaggactccgtctaaaaaataaatgataaaagtagaaagaattctgacattatccaactttaaggtgaataatatgctttagcatgagatttcaagtatatgatttgacttgtgtcaagctcctttgtccttctgacccttatttttttcatttaccagtgaggtgatgattgataggacagttttttcttacctccctaataacaattctgggagaattaattcattattgaaagaggaattctttagcctgctcataaaatgatatatccaaaaattatacatttttgaatgactttccaaaaatacattatggctttctatgttggactcttgctatttttagaattttttgaagtcaaattagtgaaatggctagtttctcctttcagattaattgtctgtctttggtatatgtttatgagttgccttagaggaatcaactttttttttttttttttttttagtaaaggtctcgctctgttgcccaggctggagtgcagtggtgtgatcacagctcattgcagctttgacctccctgggcttaggtgatcctcccacctcagcctcacctcagcctccagactagctgggactacaagtatgcaccaccatggctggctaattctcctggctcagcctcccaagtagctgggattacaggtgtgcaccaccatgcctggctaattcttctggctcagcctcctgagtagctgggactacaggtgtgcaccaccatgcctggctaattcttctggctcagcctcctgagtagctgggactacaggtgtgcaccaccatgcctggctaatttttgtatgtattgtagagacaaggtttcaccacgttgcccaggctgcagttacatttttacttgaaaatcgttcatttctaatgcctttttaattttttaaatcagaaaagaacaaatttgttctgccagactattattaggttcctaattctgtgaagctgtgacctggggtaaaggttaatctgtagttagcttaaaaccagtttcattactagcctttacagtatactttggtatttatccaagatcggggtgctggctttttatgtgaaaggccagaaccttaagtagcaagaaaaagtagtccttaacttttcattaaagtataacatgaatattgaaatgtacatttatgctcaaggaacaccattttaccagcatgctagatctgcagtcagttaggaattgatttttgtatatggtataattacagttaaagatacatgtattttttccaattagatattcaaatgacctggtactgagattttttaaaaagcagcattgtccaaaaaagcaactttggcaatagttggttcattcaccactagaatgaattccaatcctagcccaaaaggaggctgaaagatgtgtcagagcctctttttctttccggatcaccatttagtctgtaaaaaataaagcatgtggggatttctgttgtgatccccacaaattgaaagtcacatctgcaaaagttagatagaagtatatcatgcagtatctgtgaagtaatacttgcaaggtatttatgataggttagtcaccagttaatgtgctaggaagaagtcaccatgcccggctatttttttttaatattttttagtagagacagggcttcatgttggccaggctggtctcaaactcctgacctcaggtaatctgcccgcttcagcctcccaaagtgctgggattacagatatgagccaccatgcccagccttggattagctctttatgattccttaatccttttttctagtaccttacaaattaatttttctgttttacatctgttaagagacaaaggacttaagtgcaattaaattggacataaaactggtaagaatttattacatagtaaaactcatgatcctattcaattgtaaactcttggtagctagtgggtacagggactatgtttatgctttttggatttccatagagtgaatgaacagtgaattgcatgtaagggtatctatatctttgtgaattcacagttgtctcaagtagtagaaaagcaaaagtaaaagttgtttttacagttgatttacagttttcaccaaagatctaaatgacctgtgtattaaacaggatcaaacttcatcatccaggaccatgtataacagcactcaataaagcaatagataaagggtcttgatgtctgatagtgctgcgtggtacttgctatggagggtctggcagaactggactaaaacagcttctctgagcttctttctttcttctttttcttttcttttttttttttttgagacggagtttcactcttgttgcccaggctggagtgcagtggtgtgatctcggcccatcgcaacctcagcgtcccgggttcaagcaattcttctgcctcagcctcctgagtacctgggattataggcatgcaccaccatgcctggctaatttttgtatttttagtagagttgggggtttctccatgttggtcaggctggtctcaaactcccgacctcgggtgatctgcctgcctcggcctcccaaagtgttgggattacaggcgtgagccaccatgcccagtttctctgagcttcttttatgttcttctgttttcccttcagaaaaactatacttaggttttcaaagccgcctatttagttaaatgaatgcagaaagatgtgatccagatttccataacttcaactctgtactgcatttttctgacattgtttttcttgctgactctatgcagagccaaatctacagcttttttatagtagagatgatgtttcctgtgaggtttttttgttgttcttattgttgttcttttgtttttctttttgagatgaagtctctctctgtcgcccaggctggaatgcagtggcgtgatcatagctcattgcagccttgaactcttgggcccaggtgatcgatcatcccacctcagacacctgagtagctgttccagccaccagagtagatgttccagcctggctaatttttatcttcctattttttgtagagacagggtctcgctttgttacccaggctggtcgtgaactcctgatcctcccgcctcagccttccaaagtgctgggattacagacatgagccaccatgcccagccatttcctgtgttttaatgtctttagttagttagttatagaatagtgagggattttttttttttgctcagttacttgaacacgttataatataataaggataacataaagatcttatccttgagttgtctggaactgtattttaaatgataaaactaatttcagtgaccctgattgaccctgttgattttatagataaggacgaaacatgttcaggtcacgcagctagtcagtagcagggatagcacttaaatcctggtcttgtgaccttgattccagtacccctctctgcttttaaatatattgagccgtaatttttaaagaatctccccaagtttaaagattcagaatttattaattgtgttttaatagttttaaaaccatttctaatctcattttattttggtgactctgggacttaaaatacatagttctttaaaaaactgttatattaatatatagtatctcacaaaataaaagtatattgcaatttctagcaaaacactgaacgggaatgtcaagttatgaaatgacttagattaaaagagtttaagatgtgagcaacacgttctttttagtattatttagacagtcgtgttgctcaatagagaggtggaaatattgaactgggaatctcaagacctgtgttttgtcctgtcaccaactagctgtatgattctgagcaaatgacccaccttcgctgggcttcagtttgcttgtctgatacataaaggaatagagctagaattagaactatctcttcagtaaataactctcactgttgctgaatgtgagaagtcaggcagagcacatttgttgtcagaagtctttggacatgaaaatgatctgtgcctaatattcttcatcttgacgctagtaagtaaccacaggcccgccagccagccagcaatcaatctccatctgtagaacttccattgttgtccatgtatagcagtctggagaagggccaggttttatttttgccaggaactctcttggcaaatctgtatccctagggatgtctgtttaattttgtggtgcagagcacagtttagtgaaaaagaagaggaatgctgagctatttgattctgaatgctttcagagatagatcattttcatttgtttccatagtatctatgtttcaagatgttttgagggagaaggtgagccaaaataagatgaaaagaggaaggtgagaaaccttccagtatatgctgactcaggaaatacatttgaactatgcaagtatgtgtgtttccacaaatagaaaacttctgatatacatatccagatttgtcattttagcttttctcatgcataactttttgattttaaactagtctcctagatttaaactgttaagaaaaaaaaacttttatggaaaattggcatattctactagatatttcaaaactgtcccattatcttgccttctggaaataaatataaaagtatttgaatttgaataaattctccactttttaaattcatttataaagatctcagtttacatctagatttaacattcatttgttcaagaaaatttattttgtgaccaaaagttgtatgctgaaaattaaatacctgaatttcttaaaccatagaaatagatcaagttgaggttgcatttagttaaaatgccagtgtgtgttaccactgaccttcattttttattatctaaagtttttcagtctttcatacctttaacatctttttcttctaactttcatatccatttgttgacaaatcctaagaagtttactttcataatgtctctcaaatttcaccctttatcttcactgctgttggcctatcctaatccagaagggcctagattgctgcaacaacttcctaactagtctccctttcctcagtattacctttaaaagtcttaagctaacatccagattaatcttctttaaacatcagactgtatatctgtttagaaatcttaaaacttcttcatttaagtctcaatactgtcaagcatttaaagccctttatgtgtggtcctttcttttccatccaactgaattaattcagcaaatagtgttgcaagcagcgatatgtgaggcactgtgcaaagataaagataaatcaaatctagcttcttgcagatataggtcagcattaatgtcaacacatccgggatttttttttccttttagaaacttgttctacttcattccattccacttaaattattcttgcccaagatatcagtgatgtcctcattgttagattgggcagttttcttttcctttttttaagaaacagggtcttgctatattgcccaggctggtctcaaactcctggcctcaagcagtcttcctgccttggcctcccaaagtgttgagattatagatgggaaccaccccactgggcagttttcaatatgaattttactttactttgttatggcattatatactattgaccatgcctgcctccctgatacttcttccttctgtagtttttaggtatagaaactattcaccttttcagtttcttcttagaacttttcaaaggaacaaagttttagttctgttgatttttattttaagttatgttctgtttcattagtttctatctttattatttctttccttctacttcttgggttttgggggtttttgtttgtttttctgttccttttcttcttcttgagatgtatgtttagctctttcatattttaaaaaatatactttaatttttagagcaatttaaaatttgcggcaaaattaagcagagcattgtcatatacccctctgccccacacatgtacagcctcctccactatcaacatccctcaccagagtggtacatatgttacaattgacaaacctacactgacacatcattatctcctgaagcccttagtttacattagggtttactcttgatgtacattctttgggttttgacaagtgtataatggcatgtgttcaccattatgttatcaatcagagtagtttcactgccctaaaaatcctcggtgctccacctgttcatccctccaacccctagcaaccacagatgtttttaccattgtcttttctagaatattatgtagttggaattccacagtatgtatgtagccttttcagattggcttctttcacttaggaatacacatttaatcaggtagggtatgtctgacaaataattttctaaaatcttaaaatgactacaaaaggaatacacatttaagatttctctacatcttttcatggcttgatggttcatttctttctcttttttacattttatactttaataaaatgataaacactgttacaggtaaaagacagttcagtacatttagttggataagatttttaaaatttttaatttttttttttgagacagagtctcgctgcgttgcccaggctggagtgcagtggcgtgatctcagctcactgcaacctctgcctcgcaggtttaagtgattatcctacctcagcctcccgagtagctaggactacaggcatgtgccaccacacctggctaatttttgtatgtttggtagagatggggtttcaccacgttggtcagactggtctcgaactcctgacctcaagttatctgcccgcctcggcctcccaaagtgctgggattacaggcatgagccactgtgcccagcctagttggataatatttaaaaatttacatatttgcgagctcgtagattctttaccaccctggtatattttaatctatgtagtcagagtcttctggaattccgaaagttttatcaattttattttcttcaaacccaaattttcttttggcccaagattttattgcaaatatgttatcagtctatctgttagcaagtactttatttgcctgatgtatttcttcaacaacttgcgggtcacattatttgcatttttcaacttctgcctttgatccaagagtgaagaatgctctttggctaacacggttcactccttcatctcatgttggccaattttagtttttctgatgcttttctgtaagtttgcatgcttttggcttccctgaaacaactgagatttcagaacctccaatttatacattcttgcatgaagaattttacttggaaaagactgataataattagaagttccagttctctcacagtcaaccatatcattatcaactaaactttgaaggacttttttcttttactaacacagcagtaatgcctttctctttgggagcagtcctctccatgtctttttttttttttttttcaagagatggcatctcgctatgttggccagattgatcttgaactcctggcctcaagcagtcctcctgcatcaacctcccaaagtgctactattgcaagcatgagccaccgcacctggccttctccatgtcttttaattgaaatacatcttttgttttaaaaaatgtttccatcatgcaggctctcttttcttctgcactcagtccttttttctttgatacggtgtgggcaccaggccttccaatgatggggtctgcacatggggtgaggggccagctcatttctttttattgctaaataattgtccattgtctgatgtaccgcagtttatgtatcatccacctactgaaggacatcttggttacttccaggttttgccaattatatgagaactttgtactttctgttcagtttttctgtaaaccaaaaaaaaatgctctaaataataaatctattaatttaaaaaaataagaaaaaagaatctgtctctccattcattcaacaaacatttgtcaaatatctaatatgtgccaagcaaagaatgaagtactagaagtaatcaattacataagacatatttctttcaaggagtgtagtctagtgggaaaagtaagtcaacaattggagtgatatttgtatttcagaagtgtgtatagagtgttacaggaccccaggaagggaccatcttagtcttagttggtataggggagggagagacagaaaaggcttttaagaagccatgtttattggagacttttagaatgagtatcagttgactagatcaaaatttgtgtgtgagggcatgggcaccttgagataatattctgtatagagtaaacagtatcagaaaaggcatagaaagaagaaacagcatggcatgaacagagaactacaaaaagttctttccttcgcaaaagaaaagattgcgtttgggggtattcaggtcatgaaactaagagggtaaataataccttgaagggccctctgtgttaaatgaattagaattggttctatatcctgaaggctaaggagagttactgatggtggatttagttaatatgagaagattcctctttttgtcttctgcaaatacatagaaatgctggataaaatataagctccctttctcagtttttttttattactacctaattaagtttgaaagcaagcaaaggaaatctccagataccagaaatgacaagaaaactcaaactcagatatgaaagagagctaaagccaaaatggccaatggggagtgggaaccatagttttaagggctatatgaggtgaggagaaaagactttaggcttctgagagtcagagaattgcaattgacctgtgtgtttaaaattgggagccacaaaaggccatgctgcctttgaggaagagtattcaacagcatcactcccctggcttacaaaagcaacaaggacctgtaagtggggttgtaggccttcagggagtcagaaacaaggaataaggctagagggagaagatgaccagtgacccaagcctaagccagtcagctcatagcattctactggccacagtgcttggttcaagggtggttatgttttctaaaaatttatttagttggagtgaagcccaggaccacgtttgttggcttaactctttcttccttctctggttttgaagatggaagcatgtagctctgaaagctgctggttccatcttgtgacaacttggaaagtcagccaggatgaagatgaacctctggaaggtggatgaagaatcaaaaaaattcacccagtgtgagacactgaatcaaaacaacattgattatttcagctgctggtgatgacataatagattactcacactaacctcccacagacaaagattattgaaatgtagatttaacaattacatatatgtatttatatattgtaaacagctatttaaaggcactggaaaggaagtgaaagaaaagataaactcaatctgaaaggaaggaacttgcccctgaaggtactccccagtctgtgcctggctccagaggcagaaatcttagataacagggctcaggactagtagaacagccagaaactttggcaaaaaatcgtggaaggggaggagatgcagaaagattagtgcccaaacctgcatttaacatccacccaattccttcatatgtgtggggaggcccaggaaatgcaatgaaaaagcagcacgtggaagctaaaagaatggagaagagctttcagcagatgctgatggcaggagagacagaatttggaaattgagtctcaccgaattaactgcctgctagaacaaagatccatcttcagaggaatgttacagaatctagagtcatgacaacatattatgcataatgtgtaataaccaatccaaaaatcactacacatgtgaagaaacaggaaaatgttaccacgttcaagagaaagtagtcaataacaaaatatcttcaagatgaccaagtgttcatattcgaagtcaaagatgttaaagcagtcattataaatatgcttgaggactatgaaagaaaatatgtatagtaattgaacaagtaggaaacctcaaacagagaaagagaaattttttctttttttcttttttttttctttgagatggagtctcactctgttgcccaggctggagttcagtggtgcggttttggctcactgcaacctctgcctcccaggttcgagcaattctcctgcctcagcctcctgagtagctgggattacaagcatgcaccaccacgcccagctgatttttgtatttttagtagagtcggggttttgccatgttggccaggctggtctcaaacccctgagctcaagcgatctgcccaccttggccttacaaagtgctgggattacaggcatgtgccaccatacccagcctctagaatttcatatccagaaaaactagtcttcaggaatgaagattaactgaagacatttttcagataaaaacaagaattcatcaccagcagacctgtaatataagaaatggtaaaataagtacttcaggctaaagaactaatactagaaataacactggaaatgacactaactggtaactcatatcttcagaaatgaataaagatcaatagaaatggcaaatcagtgaataaatttgaaagactatagattattttcttaatttcttcaaaagacatattagtggttaaagaaaaattaaagcactgtattgtagggtttataacagtagcacaaaggattgggataaatagaataatgctgttacaagatatctgtatttagtgtttagtagtacagcattaactctaagtagattgtattagttatggatgtatattttaatttctaaagcaaccagtaaaacaaaaatgcaaagagttcagcaaaggacaatagaggcccacaaaatactagttcacatccactaggatggctataataaaaaagatagaacaataacaagtgttcacaaggatgtggagaaataggaaatcatacactgctggtggaagtgtacagtattgcagctgctttgtaaaatagtttggtaggtttttaagaagttaaatgtagagttacacaagacccagcagttcccctcctagatatatacccagtggaaatgaaaacccacatccacagaaaaacatacacatggatgttcatagcagccttatttaaaatagtaaaaaagtggaaacaatccaaatgtccatcagctgacgaatggaaaaataaaatgtggtatatccatacagtgggatattgttcagcaataaaaagaaacgaagtactgattcatgttgtaacatggatgaatcttgaaaagttaagtgaaaaaagccagtcacagaagaccacatattgtattatatcatttacataaaatgtctagaataagcagatctatagagaaagagagttgattcgtgtttgctttgggctggggaaatgaggggaaggacagctaatgagtacagggtttctttgaaggggatgaaaatgatctataatttgattgtggtgatgtttttccaaacctatgagtatattttttaaaacattgaactgggccaggtgcagaggctcatgcctgtaatcccagcacttggggaggctgaggtgggagaattgcttgagcccaggagtttgagaccagcctgggcaacacagtaagatctcatctctgcaaaaaaaaaaaaaaaaaaaaacaacaaaattggcatggtggcatgcacctgtagtcccagctatttgggaagctgagatgggaggatcacttgtgcacagaaggtcaaggctgtgaccttgtgaccttgtgggactgtgatcgccactgtactccatcataggtgacaaagcaagaccttgtttcaaaacaacaacaacaacaaaacattgaattctatactttaaatgggtgaattgtatggtatatgagttatatttcaataaagctgtttttaaaagacaataagaatactaaattttttttttcagttcaccccaaaagaggaacagagaaacagcaaacagatgagacaaatgcaaaacactaaaatggccagtccagccaaatccagccaaatcaaatgtaaatcaacttaacattacaattaaaagatagagattgtcaagttggataaaagcattgcccaactttaagctgtctgcaaggcatgcacttaacaaaagatacaaagcttcaaagtaaaaggatgggagaggatatactgtgcaaacaaataattcgagagttagaatagataatttaataatggaaaagatggacttcaaggagtactaccagagataaacagggacattttataattttaaaaactcaatatatcagaaagacataatcccaaatgtatgtatgcctaattagcttcaaaatacataaaccataaaactgacagatggaagaaaggattcaagtccacagtcatacttggagattttcatatcccttttagagcaattagtagaacaactaagccaaaagtctgtacagatatagaagatcttaatagccctgttaaccagcttgccccagttaatatttatagaacccaatacccaaaaaatacagaataaacagtctttttaggtaccatggaacttttaccaagatagaccatatccagggccatgaaacaagtcttaataagttttagaagattgagatctaacagagtatgttttctgattacagttgaattaaaatacaagtcagtaacaaaaagatatttggaaaacccccaaagatttggaaattagatagtgtatttctgaaaatattttgaactgaatgataataaaaaatgtgttagcatttttgggatgcagttaaagcactgcttacagagaaatttatagctttaattgttcatattagaaaggaagaagtgttaaaatgtaatatttaagttaccagaaggtggaaaaaaataagcaaattaaacccaagaaagaagaaagtaaagacaatagcagatatcaattaattagaaaatagacaacagagacaataaacaaaaccaaaatggattttttcaaaagatcaaaaaaattgaaaatgcctagaaaaagcttattatataccaatactgataatgaaggaggagcatgattatgtatctgtaaacttcaaaaagataatcgaattctaaaaacaactttacaccaataaatttgatgccttcgatgaaacaaattcctggaaaaatgcagctttccaaaactgacacaaaattaaatttaaaaactgaatagtcttggcctggcacggtggctcacacctgtaatcccaacactttgggaggctgaggagggtggatcacaaggtcagaagttcaagaccagcctggccaacatggtgaaaccccccatctctactaaaaatacaaaaataagccaggtatggtggtgcatgcctgtaatcccagctactcgggaggctgaggcaggagaattgcttcaatctgggaggtggaggttgcagtgagccgagatcgtacccctgcactccatcctgggttgcagcgcgagactgtctcaaaaacaaaagcaaaaaaacaaaaaaaccccaaaaaactgaatagtcttttatgtgtcaaggaaattcactttgtgatagaaaacattcctacaaagaaaacttcaggcccagagagtatcaaaagtgaattctcaaacatttgtgaaagacactgtaaaatctaacaaacagcttcagaaaatgaagaagaaataacttctcaactaattttgtgaggctagtataattcagatactaaaatctagtaaagacattatgaaaagttaaaaatctcttatgaacatacataaagctgtttaacaaaatattaacaaattgaatccagctataaataaaaggattaatacaacatgaccaagtgggttttatcccaggaatataaaattggttttgtatttgaaaataaataaatgtaatccaccacattaatgataaggagaagaaatgtggccatctcaatagacacagaaaaagcatttgaccaaaatcagcatggggcttaaataaaatccagcaaactggaattagaagatagtttcatcaatctgataaagggcatctacaacatgacttcagctaacatcattcttagtaataagcccctgaggactatgcctttaatatctggaacaaggcaagtgcagggagccgaaggcccatgggacatgaccaactcagcattccactggaagctatatgatcaaacagcaaactgtttatcatgaatgcaggatatgagcaaactcacaagtgctcctgccgacagaagatttgctggactcaatcactccctgacaccgacgttatctactgcgacatctagagcctgttgttcgaagaatgcagtcttgaaagcctactccggaccgagcagctgaccccttcttccacccaccttctcactatctcttttgcctagaaatacggagggctgtgtagagctcagggcccttgtccactagaggcaaggtgccccctgactccttcttccaaatatactgttttgtctttgtcttctattcccgcattcactccctcttttttcagttccccttgatccgtgcgggttatatagtggcgccctgaacagcgacagaattgggtgctacacaggcaaggataccattctcaaaatttctactcaacatttttctgaatgtccttgccaatgcaataaggcaaggagaagtaaaaaaaaaaaagattaaaaaggaagaagtaaaagctccctattctcagattatttatatagtagaatatcctgaggaatcaattttaaaactactataaacaataagtaaatttaacaaagtcttgagatacaagggcaataaaaaattaactgtttttacttaaataagatttaaaaaccaattatcttttaatagcatcaaaaatacttaagaataaatttaacaaacatgcacacctctacactgaaaagtataaaatactgctgagagaaatttaaaaagatttaaataaatggagaggtatgttatttgagtccctaaattctgtttcagttgaagccaattagagatagactttccatggactaataacgaaaagagtctcaagtaatatgctggagattgtagtttcgtttttgttttgttttgttttgtttcgaaatattccatcatttctgtgtaacactaagcctgatggttggatttgagtttagcagacctgccccagatggaagcctgttaagacactgggaattagattagaagttatgctcatcaactatgcagctgtagattagagcagacgattccactagtacatatgttgacagaatggggccagtggtggttcatatacctgtttgttgtcaaataccaggtctagatgttttcctcatcctcaaatgagagatcacatagcaatatgggacttataaaactttcagaacaaagggaacatcattatgaagatttagaggaagagcaactctctgaaaattatttattatagaaatgtaagaaattttgaaacttttctagcatccttagttgattcaggaagatatagcctctgtggaactgaagtataaaagtataaggaacaggctgagtgaggtggctcatgcctgtaatcctagcactttgggaggccaaggcaggcagtaacaaggtcaggagttcgagaccagcctggccaatatggtgaaatcccatctctactaaaaatacaaaaattacccaggcgtggtggtgggcgcctatagtcccagctactcggaaggctgaggcagcagaatcacttgaacccaggaggcagaggttgcagtgagccgagatcgtgccactgcaccccagcctgggcaacagagtgagactccatctcaaaaaaacaaaaacaaacatacatacacaaaaagtataaggagcaaataggctgagatgaaaagggaacaataagcatggaaagctacaggtaaactggacatgaaatagcagtgaagatataaactgaagacagtgttaaaagcaggattcaccctgaggtgtactgaagcaatgatgtggaaaacagatttgagaaattttctcagaatgcagaggaaaaaaaaaaaaggagatgaaaactgtgagggagatggtagctatggatgacagacttttctacagcaccagtgccagaacttgtgagccaaagttttcaggggaaaaggttgtgactagagagtgttgtactggctgcattttgtttcattctcgaaggttacagacattcatgtatgccagggttcaaaatatgctgtgcacatagccttcttggagaactaaaacaaatgaacaaagttttaattgactgaaagacaaatcaaaatgaacttaagaataggatttatgttactaaacaccttcagacttccagaggactgccagcaagtatagggccctcccgagttcttagaatcctcatcttagcaaaccgcattgattgaaccgtgtccatggatgagtctgcagaaatgtgtgtcgtgttggcatctggattacacttaaaagcaaacagttccctcatgagttattctccccggacgaaattgtgtagttgggcgcaaataattcgtctggaaaaccctctccctgaggcattatttaccacaagatccagaagttcaattaaataagattacagtacaataatgctaaaaaaaaaagaaaagaaaaatttctccaaaaaaactgaaaagaaatatttcaaatgttaaaaaattaaatgactactaagttgtgattttcaaatcttctacttttgaaatgagcatgtatttttcaataaaactatagataaaggaaaattgattaaaatgctgttaactaagcaaaagggcatacaaaatagtgaaacgaaagccaaaaacaattaagattttaattaaacagttaaactagagaacataaatattatttaaatagtagtattagcttaaacaatgtaaaaaggaacatttaaaatactaacctttttagatttaaaattcttaaattttaaaaacagacgttaagttctttgtgactgctctaccaggaaaaaaaaataaataaataaatgtgaggtcttaatttctttgtgcagtaacctccaatctgaggcaaacaattagagcacattctgatgaccttcaagcttgagggctttccaggtaattgttctttaggtggagagccaagggctgaggatagaactcctggtccctttccttgtaccttttatagatgacttgctttcactatcttactgactaccctggtttggtacttgaaaatagaggcaggatcaaacttttagccttcactttggatcctgttcttacctactgcccaactccgaggagctggtctttctccagacagtacttccactccagagatgtcctgcccaagactgacgcacagttgctctcccactgagccaggttcctcaggtcccaccgtcctcctgtcctcaaaagcacttaggatgtagcaaattgtcttattgttttactcccgactagcaaattctcctttctaattagtaagcctatatatgctaccttatacttatgtcaatttttttgcaacacattgcattttctacatacttcctctggatttggtctgatatggtcatctttgtgttctctcctttgggctctccttttctgggacatcgttcacaatttgtccatcctgagtgtgtttctatagcaattaaaaaccaaaacacaattgctttctcaatacagttataaactcctgaaataaacagtgtctgagggctgaaattgtgtctcacgcttttcttatgcaacctagaacaaagcaacttgggattaaaaaaaaatactaaagtgtcagtaacagcagcaagtagcatttctttggctctgcattaccctcctaactgtggaaaccggcttcctccaaccccttccccaactagtccagggagtcccagggatagctcaagtttgcctttgactacaattctctagactactctgtgggtggccatttcccccagcctgtattccatgaatgtttttctctgagataccatgccccacacctctttccttcctcttactctctggctcctatgcaaaatctactgccacccccatgctctgatacccaatgttctctgagactcagttctttggtttggttcttcagctggtctagttcaagcgatgtattgccctgcctctgcagtaccaacccattgtctttaccctagcttatgtgcttagattcactttcctttagaatgagttttttcctaggaggatgctggagccacagaacaagtgttccctgcttcatggactaactcaccaatcaaccatgttaaaacatctgttaatcttctaaggtagagttaagaaactatcttctccaagaagtcctttcagaattccctctgcctgtatcacctccagctagatatgtatctcttctttgtaccatggttactctgaacatgtcctggtgtattagtcccttctcacactgctaataaagacatactcgatactgggtaatttataaggaaagagatttaattgactcacagttccacgtggctggagaagcctcacaatcatggtggaaggcaaaggaggagcaaagtcacatcttacatggtggcaggcaaggagagcttgtagcaggggaactcccatttataaaaccatcagatctcatgagacttattcactaccatgagaacagtataggggaaactgcccccattattcatttatctccactggccacgcccttgacacatggggattattacaattcaaggtgagatttgggtgatgacacagacaaatcatatcacttggatataatttttatcatattagatggtaattatctttttacttacctgagtccccatctaaactatgagttgattgagggaaagtatcatgtctcatgcatctttgaattctgaatgtttagcttagttcttgtcagttagtaggttctatagggtctcaagttgagcctgtgatatacttgtgtacaacacaatagatttggctcaaatattacatgatgtcgattaatggcagttttccatttgataagaattatctgccaaggcattcgttttcctttaagattgatgtcaaatcaatttatcaaacattttgatgagcacccatgtatcctaagtactgccttgtcccttagatatatggaaatgagtaagacatggttcctgtgcagaagaaacttccctgggtctccctccctccatttctttattcttccttctcattcatccttgtctggataaatttttactgagcctggatttgcatctaatggagtaaataaacgtaaggaggttaattatagcatagtatactcagagtaataatcaaagtgtgttccagatatagagatagcacggaggaaagcatgatagaattcttagggtgtacggggtatcctggagaaggtgacttctgagtgagttatcaagggtgaaaagacactctccatgctcaggtcagtgaaaggtacttcgaaagaagaaagagaatatgcaaaggcctagagaagtgaaaggaccatgtcttccagaaacaataagtactttggtattgttgcagcattaagttcagtagaatgatgatacaagcggtggtgagagatgaagctaggatagtaggcaatattttaagtgccaaaatatttcttttatgtttgggtgactttttagttaagagaatggtaaggtctctaatatagctgatgatatttataatccaaacatgaagccgtgtattgctttatacaaagttctgtggtcatctagctatattttagtgtttattgtataggtagatgagaatgaaaaagaagatgctccctggagtttatagtcttgttgaggatacagaatatatccacacagagagtttagagcaggggttcccaactcccaggctgcagaccagtaccagcccatggcttgttaggaaccaggctgcacggcaggaagagagtggtgggccagcagcattactgtctgagctccgcctcctgccggatcagcggtggcattagattctcacaggagctggaaccctgttgtgaactgcacatgcgagggatctaggttgcccccttcttatgaaaatctaatgcctgatgatcataggtggaacagtttcatcccgaaacatctccccacctcacccgcactccccaccccatctgttgcaaaaccgtcttccacgaaacccgtccctgatgtgaaaaagtttggggactgctcgtttagatacagcacttaccaagcaatctacagactgctgccaaccaaaattgtaaaggtggggtataagcacaattttgatggagttataggaatgattaggagagtgcgtaattagaaagagacaacctgatttttggcttaagaaaaacaagttccataagagctaactgagcatggaaaatgcaaaattgaggaatgtatttataaatgagaaatttcttgatgttctgtagtttacagtaaagaaatggctcctggccaggcacagtggctcatgcctgtaatcccagcattttgggaggctgaggcaggcgcatcacctgaggtgaagagttcaagaccagcctggccaacgtaatgaaactctatctctacagaaatacaaaacttagccagacatgatggtgggtgcctgtaatcccagctactctggaggctcaggtgggagaattgcttgaacctggaaggtggagattggagtgagctgaaatcacgccattgcactccagcctgggcgacagagtgagactctgtctcagaaaaaaaaagaaatgactccttacctagatcaacaagtaatcatctttaagccttgtaatataaacaaaaaacaaatgtatttttctttataataaatacatttattttcttattctctactaaggatgggagcctatgtgttatgtctttagttaacacttattttccactatttttatttgtatctttagatattcagtttgccttattgtttatataaaacagattgtttattgtttatataaaatgggtctctggatttctgccaaactactctcagtccatactacacagggactatcttagcctgtcctttcatctctttattctcaaaaatccaccacagcctctgcctttttccttatggaatgtaggaacccaaaccttctccttgctccactagttcctcccattcccacagctctctggttgggtattcttctattgagctagtgtggacttttggcagaccatgggagtttctatgcataccttcctagagcctttgatcagtaaatacattttacacttatgtaaattcaaacttaggaggaggtgtgttttaatcctccaaaagaagaatgggggaacctttcactttctatttatatagtttataaattgtttaagtttgacaacgagcatttgctgttttcgtaactgaaaagtaaagatggttcaattttgaaaaatgaagtcaggaatagagccttttctaccatttcaggtctattaaatgaacctatctatctatatgtgtacatactcgtacacaccccactaccgacatagtgcaaagtagtgttgaaaaactcataatgatttggaaagcaaaagccataaaaatgttgatactgtatgacctgagaactctatttttgagaaacaacttaaggaaataattcaaaagaatgaaaatctaaaaaatctatatatagccttgtctagatgctgaaaagttggggaaagaaaactttaaagtcaacatagggggaagagttaggtaaataatgatacatcaactagttagaatattattgcaacactgaaaatgactattataaaaactatgttaacaacattgaatgtttacagtacagagagaaaagaatacacaattatatgtacactgattacagctgtgtataaaatgaattgcatgtggacaactagaaaggaaagtggataatgaaaacagctgttctagtgtattggaattatggggaagttttgacattttattgaatgcttttccagtacataggaaaaatttgagtttcagattgtcagttaatttagattatcgttattctgagagttttgcagcaaaaagaaggaagaactctggaatctgagcccctttcttctcatggaccaaaataattacattgtaggaaataaggaaacctctactttcttagagacttataaaaatgaacattatcagggtaaatgatactggaatggcctcctgggggagattgtagactccattttcagagattgttaagaaaaatcagaaagtggtattgattgatttattcatattacaaaagatggattggccgggtgcagtggctcatgcctgtaatcccagcactttgtgaggccaaggcaggtggatcacctgaggtcaggagttcgagaccagcctggccaacatggtgaaaccacatctctactaaacatctgaaaattagctgggcatgggggcgggcacctgtaatcccagctacttggaagactgaggcaggagaaccacctgaacctgggaggtggaagttgcagtgagcctagattgagccattgcactccagcctgggtgacaacagcgaaactccgtctcaaaaaaaaaaaaaaaagaaaaaaaggatcaaatctgatcatttttttaagagctttattgaaataaaattcatatactataaaacccttttaaagcacacaattcagtaatttttaatatattcacagttctacaaccattgccactatctaattttagaacattattattaaaatacccattagcaatcataccccattgctccctcccccagcctctgacaaccactaatctacttgctgtctctatggatttgcctgttctagacatttcatataaatggaatcatacagtatgtggctttttgtgcttgtcttcttgtacttagcaaaatgttttcaaggttcatccatgttgtagcatgtatcaatacttcatttctttttatagttaaataatattccattgtatggtataccttattttttttatctacttgatagacatttggattgtttccgttttgggactattatgagtaatgctgctgtgaatatttgtgtacagatttttgtgtggacatatatttttagttcttttgagtatatacttaagaatgaaattgctgggtcatgttgtaagcctatgtttacctttttgtgaaactgccaaactgttttccaaggtagctgcactattttacatcccaactagcaatgaagaagagttcccagatgatcttttgacatccccttccagttcttaacacagtgcttgttaaataggaaacccaagaatagatgctaactattcttactgatactgtcatcactatcattagggaaagctgataattaccctgagatacattaactgtatgtaaaatgaagttcctgtattatttcctttactacactgcatcttgcctttgttattctcattgattggtaatggtatatattttaattatattttatagagagagactgtaactgtatgtgtataaatttcctccattttcttcaagtaaactactcgctcatggatctgaagtctgtaaatattaaatacacggactcacatgtttagggcatgccattttgtcctccttagtcctgaattgtgtggtagtggagagagatctacagatattgctgtgttgtagctgcaggctatgagagcaagggaagataaagaaggaaaatggaaacctggaccttaaacaccaggatcactgaggttagaagtacaggagggtgtgtgtgtgtgtcctttttttttttttttttttttttgacagtcttgctctgtcacccaggctgaagtgcagtggtgccatctcggcttactgcaacctccacctcccaggctcaagagactctggtccctcagcctcccgagtagctgggattataggtgtgcaccaccactcctggctaatttttttgtatttttagtagagatggggtttcaccaggttggccaggctggtctcaaactcctggccttaagcaatccccccacctcagcctcccaaagtgctgggattacaggtgtgagccaccgcgcccagccctaagtgcctacttcctttttttttttttctttttgagacggagtctcactctgttgcccaggctggagtgcaatggcacaatcttggctcactgcaacctccgcctcctaggttcaagcacttctcctgcctcagtctcccaagtagctgggactacaggtgcccaccactgtgcccagctaatttttgtgtttttagtagagacggggtttcaccatgttggccaggctggtcttgaactcttgacctcaagtgatcacccacctcggcctcccaaagtgctgggattacacgcgagagccaccgtgcctggccggtgcccacttcttatgtgtgatctctcttccctgtcctcgcctcctgtgctgtatttcttcttccctactcccttgttgcctccctgatgtcttcctatttccactttaaggggaagctcgtataaaagaacttcacatgtgattaataattaaaatgttgataatacaaagacaacctagaacaagccattgttttacactgtgggtttttttccccactgttacatttttaaaatgttttctttcctttaatgctcgttaatccaattcatctgacagatgtctactgataatctagtatgtgtcaggcactgttttaggtacctgtttctcttctccattgccttttgctcctaactttttctatacccttagttcctttcctgtcccaaattggatgtcagagagagagacaactgagaaaaagaaattgcagtgatggagtgtctatgtatattatattctctgcatattctaataatcatttcactgattttctttgacttcaaaatattgtgtgctttgattgaatgaatgcctcagagtatgtatggcaagacatcccatttgtttacacattgggtttaaggacttcttgctgattagcttacctttttccagaatggtaatattgatctattcttgattttctaagtctgacaaaatgggaagaaagctctggcaggaggagaaagaaagatacagatcagaggagacaggcagagagggccaaaataaaaagctttgctagagggagagctatgcggcagagaagttggctaaggcccccaggcacataacgtatcatatacagtatattacttactgctgccctctgtgtgtcagttcaataaaataattcagttacagctcatggagcaagaaggaactttagagattatttaatttgcttataaagaatgtgtcatggaacatgcaaagaactctactttcaccctaattaatacaaaaggagccaataataggaaagacaaaatggatatttttgccatcttttatttattgactgagaatctgtcttctcgaagcagaaatgttctccaactaggtacacaaatgaatagaccagtattttccccttttttttttcacatcatggtataaaagaatgataatttgtaaagtactagagcaaacatacagggctgctgtcaacttaggtgactgacctggggttgaagcaatcagtagcttgggaataaattgtgtaaactgcagtattgtagtcattaaatattgaattttatcctgcaattagaaagctaacacctcatcttggtgacttgattttaaaaaaggaagctaacatgttttggcatgaataagatagctgtaaataatggcctgattaactctgttatctttttttttctctctttttctttttcttggtcttactctgtcactcaggctgctcactgcagccccgacctcctgggtttaagcaattctcctgccttagcttcctgagtacctgggtatacagatgcatgccaccatgcctagctaattttttttttttatttcatagagacagggtcttgctgtgttgcacaggctggtctcaaactcctggactcaagtgatcctccttcctcgccctcccaaagtgctgggattgtaggcgtgagccactgtgcctggcctctatggcttatatatatagatacatgatgttgtggctggtagtctaatgtattaggtatagctccatcagggaaaaagaagtgcatattttagattattaaatctggcctctgacttttagttttttataaccacttgggttttggagaaaatttgagtgagaatgttggactctaagctctagatctttggactcatcaagccttggataagagggtatgtgggtcttgaaagtgatctaatatgttttttataggtatctaacattctatagtattttgaaaattacacctatatattcatataacactttagttctctgcattttcccctttagttctgagggaattttttggacctataatgagagatcttcttttaaaattacattaatgtttggcatatatattatatatatgttatttgtaagttatgaatataatatttgtaagttatgaatcatataaaaaactaacgcccacaaacctatcacaactttagtgttaagttagtctgtgttagtaagtgctggggatggggcagcaacttaaacattctcgtaacaagtccacttctcttcctaataagtatccttatatcgatacatttcattccttatttttaaaatgtgtagtgttgtgattaaaacaaattgaaaccaatgacaacaaatgttggtaaggatgtggagaaactggatcactcatacattgctgttgagagtataaaatggtataactactctgcaaaatagtttggcagtttctttaaaaactaaacgtaccctttttttttttttttttttttttttttgagatggagtcctgctctgtcacccaggctggagtgcagtggcacaatctcagctcactgcaacctctgcctcctgggttcaagtgattcttgtgccttagcctcccaagtagctgggattacaggcacctgccaccacacccagctaattttttgtgtatttttagtagagatgaggtttcaccatgttggccaggctggtctcaaactcctgacctcaagtgatctacccgcctaggcctcccaaagtgctgggattacaggcatgagccactgcgcctggcctaaacatgtaactttcatatgacccagcaattatactcctgagcatttattccagagaaatgaaaatttaacataaaaaccttcatataaatatgcatagtagcttaatttgtaataccccaaaagtggaatcagctcagatgtccttcagtaggttaaacaaactatggtacgtatataatatagaatactatttaacaataccatgcaaggaactgttgatacatgtaatgtcttagtctcttcaggctgctgtaacaaagtaccataaattgggcggctcatataaacaacagaaatttatttctcaaagttttagaggctgggaagttcaagaacaaggtacctgcagattcaatgtctggtgaaaatccatttcctggctcataaaatggtaccttctagatgtgttcccacagggtggaaggaacaagacagctttctggggcctctgttataagagcattaatccaattaatgagggctctgcccccatgttttagtcacctccccaaaactcacttcctcatacaattacaatggacattaggttttaacattaattttgagagggccacagacactcagaccatagcatacaacaacttgaatgaatctccagggaattatgcttgccgaaaaaaagccagtctcaaagtttacatattgtatgaatccatttatttaacattcttgaaatcatagagatggagaactgattaacggttgccagggaatgggggaggtaatagaggtggatgtggctataaaaaggcaacatgagggatactagtagtgatggagtggttgtgtgcttgactgtaatagtggagacatagacctacacatgataaaattgtataaaaataaatacatcccctacacccccctgacaagagtacaagtaaaacaggaagtctgaataaaatcagtagattgtatcaatgtcaatatggggaaaactgtgcaaagggatctctgtattctttcttacagctgcatatcattgcaccattatctcaaaataaaaaaatgcaattttaagtaaaattactggttcaaatttttaagaactatagcatatttattttaataataattatttattattaaattatttataaaggaatggaatcttggaatggaaaggacctttgaatgatgcactctagtcactggcactattgttggtagatgtttgctacaatctcattttagtaaactagacaggtatttctgagaggtgcctatttagcttttgtctatacactttccccctaaatttaatgtgaataacctgaagagcttgtaagatgcatgttctcaggcttactccctacggattctgattcagtaggtctaggggtggatcctggcaacgtacaattaaagaatgttatcagctgactgtgattcaagagatcagtccattgaattctgactcaagagatcaacaattatgaacaataaatcatacttgttatggtgagtaaataagaaccctttaaatttctctgtggcatagaggatttgtagttaggtgagaattttaatagcaaagtactgataaaattttccaaacacccacgtgttgaagaaagaatgtttgaccaaactgaaggttttacttgctcggaatcaacaagaactttgaacacaaagagcttgccctaggttcttagatggaaggagcccttcccgtctcttagctgcctgaccactcgtgatttatttggtacaaagaaggcaaagactcctgctttagactgtacaaagggaaagatactaatgtgaagaatgccaaagcactttataaactctgaaaataatctattcatttaattccttatgttttgtaaatgaggttccaactaaagcacttgggcagtccttttattcccccctacaccctggtagtcaagttacttaaaatgattgctgttattgaaaagcagatacagagaaattctgttctaccttttgggatgcctaggttgcagcttgttgaaatctgagtgacactctctgctctacacctagggccaataatcagaacatcttcgcttgggcttatgtcagagtccagtcctactgtttccccaattcctggatatacatattgagttggtgagttgtcctgtgaaagccactctttctgggcttgaggccaggaagcatctcccaactccttcctttccagagtgatcacaggagaacaagtacatctctccaaagaaacctctgcaaatcctccctcctcttgaccccagatatgactcagggatggtgaggcatcggagaaccagcctggacccgtttggcttttattgtgtgtattttctgggcacctcattttgatgtacagcttttattttatctttgtgcctcatagcacaaagcacatagcattttgtgttttatataagttggtattttgtgtagtaaagacacaaaaatatatatagaatgagacatactgaatttcaggtattctcctctgcagatgaaggaaaagatggggaatttatggagagagggtttaggtgtagtcataacattttatttcctcttagaaaagagttttaatgtagcaaactgttgacatctgtttacatttagtggtgggtacagagctgccttttatattactttcctaattttctatatggatattttttcctgaatttggaaatgttttgtaatttaaaattattaatagatggaaaaatcgatctaggttacaatactttttctgctttaagtttctctctcttaattctgaaagacagagaaaacagaaatcatctggtagaagctgtcccacctccccaccctcagatgtgcatccatccttacactcttccttctgctctagggacagcggagttggtgtctctccttgagtccaagtccagcccctttgtcccctctttggatctctcccttccaacctctcaggaacctttgtgctatttagctgtcaacacctcacttttctgtcaacatttaaacatgtgctagtttctcttggctttaaaaaacctctgcctcaaggctcctaatgctctatgtctgtcctccccttcatagtctaacttgtcttaagaggtatctacctggttgtctttaatatcacacctcctactcttcagcctactccagtctggcttctctcccatgaagttgctcttatcaaggtcaacagtgacttccatgttactaaatccaatggatattttccagtctccaacctttgacaccattgaccactctcttctcaaaatcctttccatgatttctgtgttacaacattctcgttttcttctaccctatctgatcttccatgctctcttttatcagcttgtcttttttttacccaaccattaaatagtgaagattctcagggatcagtcctaaacccttttctcactctaatttttttcctcaggtgatgacgactactcccatggcttgttactttccctgtgattcccaaacctctacctccagttctgacctctgtttttcctgccatagacctgtacatacagctgcctgctaaatatcacttgcatgactcatagacacttcactctcaacatgttcaaaactgaactcatccttccccaatgtttttgtccttcagtgtttttgaaaatggcactagaatccatctagttactcaagccagaaacttggggctcctacttgatttcttcctcactatcatccactgaggtgggaggatcatttgaacctgggaggcagagtttgcagtgaactgggatcatgccactgaactccagcctgggtgctagagtaagaccctgtctcaaaaaaatatatatttttaaaattttcttatcaagatcgaatttacataaagtgaaatgctgagattttaagttgtacagtttgttcagctttgacaaatgcattcattagtgtaagcctcatccctattaagatacagaacaggctgcgcatggtggctcatgcctgtaatcccaccactttgggaggctgaggcaggagaatcacttgagcccaggggagttcaagacaagcctgggcagcatagcaagaccctgtctctacaaaaaaataaaaagtaagccaggcatagcggggtacacctgtagtcttagctactcaggaggatgaagtgaggggatcccttgagtctaggagttcaaggttgtaataagttttgattgtgccactgtactccagcctgtgccacagagcaagaccctgtctctaaaaaactttttttaattaaaaaaaaattaaagcacagaacatttccatcttcctagaaatttctcttgtgacccttcccagtcagtcactctccaaagcaaccactgatctgattcaattttttaaatattttaatgtatttttaagacaatactgcagaataaaacacaaaaagatgctctaaaccttaaaaataatttattggtagtattcaagtggggctgttctaaaatataggacctgtggcatgtgatgattaactttagttgccctgttttgttcaactttaaaatttttacttagcattatggactgtgctatggcaacatcttcccatctccttattatattatttccccaattaacttgtttaaatcataccttaagactccagcaattaaaaatattgattagaaattttagattattttgtcattcatttgaatattaaacatttaaagagcctaactgaacccagacactgacttcttttgtttatttataggataggtgcagtagaggcagttaaatgtgagcttgtttataatggtccacaatggattcagttctaattcagaggtacaatctttaaagataagaggtaatttaggctctcatacaagtagctcagccctttcatttacaggtaggctggttttaggtccatagattctctacggaattccatggcatcgtgaaaagagcaagagtactaggtattacacttacctgggagaaacaaacactaccaggccccacatactgtgcctttttttcactcatctgcatgcttttttgactgtgcatctctactgggaaattttttgagtatatcccccaatgtaggtatcattgtattcatattatatacattatcatacttatataaataggaattttaaaatatatattttgtccatgattaaattttatatctgcattttattgatgaagacactaaaactcaaagaagcttaataacttactcaagttcacgtaacttactagttggatgataagttgacaaattccaaaccattttggggcctcatttataaagttattccaactatgttatcttcaaggcctcttctagcccttaacaacttgtgcttctatgctagctaacactcatctgtctaagacttagtctctgatttaatatttctttgcagatatggccctattatccatatattaatggctagtaatgttaggaaatagtgggtggaagaagagaaacttacatttaaaacagtatcaagctagcttgttctttggtataattttttaaatccttcacagaaatagaaaaaaaatcctaaaatttatgtggaaccacagaagacccagaatagccaaagtcatcctgagcaaaaagaacaaaactaaaggaatgacattacttgacttagaattatactacagagctattataaccaaaacagcatggcactgacataaaaacaagcacagagaccaagggaacaggatagagaacccagaaataaatatatacatctacagtgaactcgtttttgacaaaggtgccaagaatatacattggggaaaggacagtgtcttcaataaatggtcctgagaaaactggatatccttatgcagaagaattaaactagacccctatctctcaacaaaaacaaaaatcaaatcaaaatggattaaagacttaaatctaatacctgaaattatgaaactactaccagaaaacactggggaaattctccaggaaattggtctgggcaaagatttattgattaataccctaaagtacaggcaaccaaagtgaaaatggacaaatggaatcacgtcaagttaaaaagcttctgcacaccaatggaaacaatcaaccaagtgaagagacaacccacagaatgggagaaaatatttgcaaactacccatctgacaaagggattaataaccaggatatataaggaacttaatagggaaaaaatctaataatctgattttaaaatgggcaaaagatctgaataatgtttcttagaagaaaacatacaaatggcaatcaggtatatgaaaaggtacttaacattgctgatcatcagagaaatgtatctcactctagttaaaatggcttctatccaaaagacaggcaataacaaatgctggcaaggatgtagataaaaaggaacccttgtatgtttttgatgggaatgtaggttagtacagccattatagagaatggcatggttgttcctcagaaaactaaaaatagatctaccatatgatctggcaatcccactgctaggtatacacccaaaagaaaggaattaagtatataaaataggtttctgcattcccattagattgtagcactattcacaatagctaagatttggaagcaacctaagtgtccatcagcagatgaacagataaagaaaatgtggtacatatacacaatggagtactattcagccataggaaaaaaatgagatcctgtcatttacaacaacatggatggaactggaggtcattatgttaagtgaaataaaccaggcatagaaagacaaacttcacatgttctcacttatttgtgagagctaaaaattaaaacaatcgaacttgtaaagagtaaaatgatggctattagagactgggaaaggtagtggggtggacgggaagtggggatagttaatgggtatgaaaatatagttagaatgaataagatctagtatttgttagcacaacagtaattatagtcaacagtaatttattgtacatttaaaaataactaaaaaggtataattggaatgttcataacataaagaaaaaataaatgcttgagttgatggataccccatttaccctcagttgattattattcattgcatgcctgtacaaaatctcgtgtacctcataaatatatacacctataatgtaccgacaaaaattaaaaaattaagaaaaattccattgccatcttttgcttataggtatatgctgtgtatttaagagatttatagcaacattcacttaaaacataatttaccagatacctattaccctaaacaccataggtaattctatcagtatattttcatgaggatctttgggtaattatttttcagcattttcccatatggcaaggtgaagcctattatttttctaggtacttgtgttgctgtaagtaaccaccagtatggaaggtgcctcaattccctgcaatgccacagcaaaaacacttttatttagaaatagcctcagtgcaatttctttgtaagtcagctgtttccttctaagtaaaaattgctttgatcaaaagatctgtcatttgtctctgaaacattttctataagttttgttttggtttcagccttctttggaatttaagagagaaatgagaagacaattttggattaacacctgtctgagaaattccaaaattagaaatggccatctggtttacatgttttgcaaaatagggttttaccattccaaagagatttttaggctcttctaaaaactgctgcagctatcaacattttactatcaaactgaaaacagaatagttaaataggtgttggtgatgttcattctaagaaggaaagctacagtaacaacctttctctgttctctgagacacttagatgggcagtttaaggccatatttctcattgcctgggcccacataacctgacggcctatcttagatttcactgttataattattttaggtcaagcccaaagaattcaaacttggtagctcttacgatacctgaatttgacctaggtcatccctatgttgagggttctttagattttgactagctctcctgcctcctataatcactttgacatacatttcctagataaattcctgaaattctgcattttagaagttctgagttggtcattcaccagctcttatcagtgcctcacaggtctaagtataactggacttttaccagagttagtacttaatattaagagagcatattttcaaaagtgtcaaggccactgtcaaggaaatgaaactaaaactgtaattgcctatagaattggatgctggagaaggtaaaatgcagtgaatgctaattgttacaagcattttagaaagcagtgtaacattagcctggggatagtggttcacccctgtaatcccagcactttgggaggccaaggtgggaggatttcttgagcccaggagttcaagacccacctggtcaacatggcaaaaccctgtttctacaaaaaatacaaaaattagcctggagtggtggtgtgtgcctgtagtcccagctacttgtgaggctgaggtgggaggatcacctgaggtcctgggaggtcaagactgcagtaagccactgcattccagcctgggcaatagagtgagatcctgtttcaaaaaataaataaaaagaaagcagtgtaacattatgtttcagaaatttttaaaactgcaatgcataccctttgacctaagaattttacttactgaatgtctctcctgaggaaataataaaacactcaggaacggtccaagtgacatcagcaagatggccgactagaagcccctcgtggtcatcatcctcacaaagaaccaaaacaatagctaaaccacattttaatgaaaataactgaaggagggtactggagtacattggagaaatcaaagaaacaggtgagcacaggaacttggtagggccacatagagaacggaaggaaacatcatcctccaccaccccaccccctaatcaggatcagctggaaaccaggggaaatttctccctgcagtgaggaggtaagcaagaagatcttagcaacccctatcaacaccttggccaactatagtcctcaccattagggtcccctgcagttttcacagacactaaggccagctgagggagccacctagagtccacatagctatggtctccctatagatgaagaagtagacactgtgctccactccttgtgggcctcatggctactgcactatgccatcttggagccggtactgtgtctggagtgtgtcttcctccatgggtgagtagccacagctccccttcatccctgaggctgagccactgctgaactaccccagcccagtggccacacatccccaagccaagctgtgtttagcttttacactcttccctgtggggacaagtggaggtggagctactccacctaccccttaccctgccctttgggccagagctgaagtagtaacctgtctcttgggaaaacagtacttaggctgctcaggcctccccagtgcctaagttgaagcagcactctgcatcccagaaaacaatgccttggctgcccagagtggtcacacacctcggtacctaaggtgaagtggcatcctgcatcccagggaaatggtgcctgggcttccaagaacattcacacactgccctcccgcgtcccccaccagccaatctgagctgaagtggcacttcaccccctaggtaatcagtacactggctaagctgagcagctgtgcatcccagggctgagctgatgtaatatcctgtgtcctagggaaacagagcagtggctgagctgagacatcccaccttataagccagacaactttagtaccctgcttccctggaactggactagctccctagagtctgagctgctgacacccctctccttggggtatatagtcattgctgtgcattccctgcctcccagggcccaaacaacagctgtgttccattattctgggatatttgctgccactgcacctggcatcacagaatctgagttacttccaagtcccaccatctcagggtatacagtcactactacacagtgcctcatccactgggacctgagttgttactgagccttattggctcaggtttccaagttgcagccataccctgctcctgaaccccaaatctccaaagcaccccttcctccccagagtggttcagtgctatactgtgacccctaggggtacaatcacagctgcagcctagctccgtgggcccaagctgctagggagtacttcacaatcacagatcctagctcagtaggcagcctacatccaacctgccacagaaaatgaacctgtgccccaagacccagctgctacaataggttggcaaaaccctgcacctaggaccctggcctcacagctgctctgaacacctgctcccagaacccagcactgctacatctgcttgtaggccatgtcagacctgacacaaaaaaggatcccctcagctaagtctccccattctggggaaaataagaatagaaggaccccaaaggcccttgatactgaggacattaacaatgtatgctgccaccctgccacaaccacagatttctatagcctatgccattgaggtgtctgcagttattgctaacattgaacacagctgaagaagctacacagagactgtaccactacacttacctggacagagtcattgtactcttcctaatcagcacactaagttccaactataggtgaaagtttttctctatgaaaaccactttagaaagttttcaagaggcagttgttgctccagctgcacaaacatcaacacatggacataaaaaaaaaaacatgaaaaagcaaggaaagctgaagaaaagcaaggaaagccagttttaccaagccaggatctgtatgatataccttttagcagcttgggtccacagggctaggttgtagctataattctaccctagggggcagggcacaacactggccacactctagggaggaaggggtgctctgaagatttgggcctcaggagtagggtagggctgcaatttggaaacctgacactgccaaaggaacataactctctagtgacagaccccaatgaaaaggaaatcagtgaatttctagaaaaggaatttcaaaataatgatcttagggaaactcattgagatacaatacaagaaaatacagatagacaatgaaatcaggaaaacaattcatgatatgaccaagaaattcaacaaagagatagaatcataaacaagaaccaaacagaaaatttgcagctgaagaagtcaatgaatgaaataaatatgttagagagtttcaacaccagtcttgatcaagcagaagaatctctggatttgagggcagatcatttgaaattacccagtcagggggaaaaaaaagtaagaatgaaaaacagtgaagaaagcctgcaagacttatgggacaccattaagtgaacaaatatttgtcttatgggagttcagaaagagaaaagaagggaaaaggtgtagaaaacctacttgatgaaataatagctgaaaacttcccaagactgaggagaggtatagacatccagatcaaggaagctcaaagattcaacccaaaatgatccttcctgaggcacattacagtcaaattgtcaaaagtcaaaaacaaagaattctaaaaactccaagagaaaagtgtcaagtcacatataagtgaaccctcattagactaacagcagatttctctgcagaaaccttacaggccaggagagaatgggatgtgctgaaagaaaaaaaaaatagccagccaggaataccacacccagcaaagctatccttcagaaatgagggagaaataaagtgtttcccagataagcaaaaataaagggaattcaacaccactagaccagccttacaagaaatacttaaggaagtcttatctctggaagtgaaaagataatcatcactatgatgaacactcaaaagtaaaaaacttgtagagcacgttcatgaaggagaacaagaaaagaatcaaaccatagcactacaaaataccaccaaatgacaatgataaacattaagagaggaaaaaaggaaaaggaacaaaggatatacaaaacaagcagaaaacaattaataaaatgaagaagcgagttttcccctatcaataataagctttaagagaaatagattaaatcccccacttaaaaagtatagactggctgaatggatgaaaaagtcattaccagctatatgctgcctacaagaaactcacttcaattgtaaagacacatatagactgaaagtgaagggatggaaaatgatatttcacacaaatggaacctaaaagtgagcagaagtagctatgcttatgtcagataaaacagactttaagtcaaaaactatacaaagaggcaaagaaggtcattacataatgttaaagggatcaattcagccagaggatataacaattataaatatatatgaacccaacactgtagtactcagatatatataaagcatatcttatttgatctaaatggagagatagagtctgatacaataaaagttgggggtttcagcactccacactcagcatttggatagatcatctagacagaaaatcaacaacagaaatgaatataaagtacattttaggccaagtgcaattgctcatgcctgtaatcccaacactttgagaggctgacatgggaggatatttgaatccaggagtttgaggttagcctgggcaacatagggtgacccccgtctatacaaaaacattaaaaagcaaaatagccaggcatggtggcacatgtctgtggtcgcagctactcgggaaggtgaagtgggagggttgcttgagcccaggaggtcaaggctgcagtgagccatgattgtgccagtgcactccagcctgggtgacagagtgagaccctatctctaaataagacagactcatacctgtaatcccagcactttgggaagtcaaggcagaaggatcacttgaagccaagagtttgaaaccagcctgggcaacaaaacaagacctcatctctacaaaaaccgtaaacaaataaaaattagcaaggtatggtggttcacacctatagtcccagctactccggaggctgagatcagagaatcccttgagcccagtagttcaaggctgcagtgactatgttcataccaccgcactctatcctggatgacagggtgatatgttttgtgatatggtttgaatgtttgtcccctccaaatctcatgttgaaatgtaatccccattattggagatggggtctggtgggaggtgtttggatcatgggggtggatctctcatgaatggcttagcaccatccccttggtgatgagtgggttattgctctgagttcatgtgagatctggttgtttaaaagtgtgtagcacttcccccttcccccgttgctctcttcaccatgtgacaggctggctccctgtcactttcaccatgactgtaagttgctgaaggccctcatcagaagctgagcagatgttggcaccatgcttcttgtaccttgtacagcctgcagaaccatgagccaattaaacctcttgttttttttgtttgtttgttttttgttttttttgagatggagtctcgctctgttgcccaggctagagtgcagtgacacaatcttgacccacttcaacctccatctcccagattcaagcaattcttctgcctcagcctcccaagtagctgagactataggtgcacgccaccacgcatggctaatttttgtatttttagtagagataaggtttcaccacattagccaggctggtcttgaactcctgacctcaagcgatccacctgctttggcatcccaaagtgtaatccttttttttgtttttatacattatctagcctcaggtattcctttatagtgacacaaaacaaattaatacaccttgtctctttaaaaaaaaaaaaaggaacttctgatatgttacaaacaggaaattaaacagcatgctcctgagtgaccaatgggtcaatgaagaaatgaaaaaggaaattttttttttattatactttaagttttagggtacatgtgcacaacgtgcaggtttgttacatatgtatacatgtgccacgttggtgtgctgcacccattaactcgtcatttaacattaggtatatctcctaatgctatccctcccccctccgcccaccccacaacaggccccggtgtgtgatgttccccttcctgtgtccatgtgttctcattgttcaattcccacctatgagtgtgaacatgcggtgtttgttttttttgtccttgcgatagtttgctgagaatgatggtttccagcttcatccatgtccctacaaaggacatgaactcatccttttttatggctgcatagtattccatggtgtatatgtgccacattttcttaatccagtctatcactgatggacatttgggttggttccaagtctttgctattgtgaatagtgccacagtaaacatacatatgcatgtgtctttatagcagcatgatttataatcctttgggtatatacccagtaatgggatggctgggtcaaatgttatttctagttctagatccctgaggaatcgccacactgacttccacaatggttgaactagtttacagtcccaccaacagtgtaaaagtgttcctatttctccacatcctctccagcacctgttgtttcctgactttttaatgatcaccattctaactggtgtgagatggtatctcactgtggttttgatttgcatttctctgatggccagtgatgatgagcattttttcatgtgtcttttggctgcataaatgtcttcttttgagaagtgtctgttcatatccttcacccactttttgatggggttgtttgtttttttcttgtaaatttgtttgagttcattgtagattctggatattagcccttggtcagatgagtagattgcaaaaattttctcccattctgtaggttgcctgttcactctgatggtagtttctttgctgtgcagaagctctttagtttaattagatcccatttgtcaattttggcttttgttgccattgcttttggtgttttagacatgaagtccttgcccatgcctatgtcctgaatggtattgcctaggttttcttctagggtttttatggttttaggtctaacatttaagtctttaatccatcttgaattaatttttgtataaggtgtaaggaagggatccagtttcagctttctatatatggctagccagtttttccagcaccatttattaaatagggaatcctttccccatttcttgtttttgtcaggtttgtcaaagatcagatagttgtagatatgtggcattatttctgagggctctgttctgttccattggtctacatctctgttttggtaccagtaccatgctattttggttactgtagccttgtagtatagtttgaagtcaggtagtgagatgcctccagctttgttcttttggcttaggattgacttggcaatgcgggctcttttttggttccatatgaactttaaagtagttttttccaattctgtgaagaaagtcattggtagcttgatggggatggcattgaatctataaattactttgggcagtatggccatttttacgatattgattcttcctacccatgagcatggaatgttcttccatttgtttgtatcctcttttatttccttgagcagtggtttgtaattctccttgaagaggtccttcacatcccttgtaagctggattcctaggtattttattctctttgaagcaattgtgaatgggaattcactgatgatttggctctctgtttgtctgttattggtgtataagaatgcttgttatttttgcacattgattttgtatcctgagactttgctgaagttgcttatcagcttaaggagattttgggctgagacgatggggttttctagatatacaatcatgtcatctgcaaacagggacaatttgacttcctcatttcctaatcgaataccctttatttccttctcctgcctgattgccctggccagaacttccaacactgtgttgaataggagtggtgagagagggcatccctgtcttgtgccagttttcaagggaatgcttccaatttttgcccattgagtatgatattggctgtgggtttgtcatagatagctctaattattttgagatatgtcccatcaatacctaatttattgagagtttttagcatgaagggttgttgaattttgtcaaaggccttttctgcatctattgagataatcatgtggtttttgtcattggttctgtttatatgctggattacgtttgttgatttgtatatgttgaaccagccttgcatcccaaggatgaagcccacttgatcatggtggataagctttttgatgtgctgctggattcagtttgccagtattttattgaggatttttgcatcgatgttcatcagggatattggtctaaaattctctttttttgttgtgtctctgccaggctttggtatcaggatgatgctggcctcataaaataagttagggaggattccctctttttctattgattggaatagtttcagaaggaatggtaccagctcctccttgtacctctggtagaatttggctgtgagtccatctggtcctggactttttttggttagtaagctattaattattgcctcaatttcagagcctgttattggtctattcagggattcaacttctttctggtttagtcttgggagggtgtatgtgtcgaggaatttatccatttcttccagattttctagtttatttgcgtagaggtgtttgtagtattctctgatggtagtttgtatttctgtgggatcagtggtgatatcccctttatcattttttattgcctctatttgattcttctctcttttcttctttattagtcaagctagcggtctatctattttgttgatcttttcaaaaaaccagctcctggattcattgaatttttgaagggttttttgtgtctctatttccttcagctctgctgtgatcttagttatttcttgccttctgctagcttttgaatgtgtttgctctagcttctctagttcttttaattgtgatgttagggtgtcaattttagatctttcctgctttctcttgtgggcatttagtgctataaatttccctctacacactgctttgaatgtgtcccagagattctggtatgttgtatctttgttcttgttggtttcaaagaacatctttatttctgccttcatttcattatgtacccagtagtcattcaggaacagattgttcagtttccatgtagttgagcagttttgagtgagtttcttaatcctgagttctagtttgattgcactgtggtctgagagacagtttgttataatttctgttgttttccatttgctgaggagtgctttacttccaactacgtggtcagttttggaataggtgtggtgtggtgctgaaaagaatgtatattctgttgatttggggtggagagttctgtagatgcctattaggtccgcttggtgcagagctgagttcaattcctggatatccttgttgactttctgtctcattgatctgtctaatgttgacagtggggtgttaaagtctcccattattattgtgtgggagtctaagtctctttgtaggtctctgaggactggctttatgaatctgggtgctcctgtattgggtgcatatatatttaggatagttagctcttcttgttgaattgatccctttaccattatgtaatggccttctttgtctcttttgatctttgttggtttaaagtctgttttatcagagactaggattgcaacccctgcctttttttattttccatttgcttggtagatcttcctccatccccttattttgagcctatgtgtgtctctgcacgtgagatgggtttcctgaatacagcacactgatgggtcttgactctttatccaatttgccagtctgtgtcttttaattggagcatttagcccatttacatttaaggttaatattgttatgtgtgaatttgatcctgtcattatgatgttagctggttattttgctcgttagttgatgcagtttcttcctagcctcgatggtctttacagtttggcatgtttttgcagtggctggtaccggttgttcctttccatgtttagtgcttccttcaggagctcttttagggcaggcctgatggtgacaaaatctctcagcatttgcttgtctgtaaaggattttatttctccttcacttatgaagcttagtttggctggatatgaaattctgggttgaaaattcttttctttaagcatgttgaatattggcccccactctcttctggcttgtagagtttctgccgagagatccgctgttagtctgatgggcttccctttgtgggtaacctgacctttctctctggctgcccttaacattttttccttcatttcaactttggtcactctgacaattatgtgtcttggagttgctcttctcgaggagtatctttgtggcgttctctgtatttcctgaatctgaatgttggcctgccttgctagcttggggaagttctcctcgataatatcctgcagagtgttttccaacttggttccattctccccgtcactttcagttacaccaatcagatgtagatttggtcttttcacatagtcacatatttcttggaggctttgttcatttctttctattcttttttctctaaacgtctctcctggcttcatttcattcatttgatcttccatcactgataccctttcttccagttgatcgaatcggctactgagacttgtgcattcatcacatagttctcgtgctgtggtttttagctccatcaggtcctttaaggacttctctgcattggttattctagttagccattcatctaatctttttttaaggtttttaacttctttgccatgggttcgaacttcctcctttagctcggagtagtttgatcatctgaagccttcttctctcaactcgtcaaagtcattctccatccagctttgttccattgctggtgaggagctgcattcctttggagaaggagaggcactctgctttttagaattttcagtttttctgctctgttttttccccatctttgtggttttatctgcctttggtctttgatgatggtgacgtacaggtgggtttttggtgtggatgtcctttctgtttgttagttttccttctaacagttaggaccctcagctgcagttctgttggagtttgctggaggtccactccagaccctgggtatcagcagcagaggctgcagaacagcggatattgatgaacagcaaatgttgctgcctgatcgttcctctggaagttttgtctcagaggagtacccagctgtgcgaggtgtcagtatctgcccctactgcggggtgcctcccagttaggctactcgggagtcagggacccagttgaggaggcagtctgtccgttctcagatctcaagctgtgtgctgggagaaccactactctcttcaaagctgtcagacagggacatttaagtctgcagaggtttctgctgccttttgtttggctatgccctgcccccagaagtggagtctacagaggcaggcaggcctccttgagttgcggtgggctccacccagttggagcttcctggccgcgttgtttacctactcaagcctcggcaatggcaggcacccctcccccagcctcgctgccgccttgcagtttgatctcagactgctgtgctagcaatgagcgaggctccatgggcgtaggaccctccaagccatgcgtgggatataatctcctggtgtgctgtttgctaagaccattggaaaagcgcagtattagggtaaagtgacccgattttccaggtgccatctgtcacccctttccttggctaggaaagggaattccctgaccccttcctcttcccgggtgaggcaatgcctcaccctgcttcagctcaggctcggtgcactgcacccactgtcctgcacccactgtctgacaatccccagtgcgatgaacccagtacctcagttggaaatgcagaaatcacctgtgttctgcatcgctcatgctgggagctgtagactggagctgttcctattcggccatcttggctccaccccgaaattttttattttattgaaagaaatgaaaatagaaacacaatataacaaaacctgtgggatacagcagattaagagggaaatttatagcaataaacacctacatccaaaaagtagaaagattttaaataaatgaattaacaatgtatctcaaggagctagaaaagcaagaataaaccaaacccaaaattagaaataaataaataataaagatcaactaaaaaaaaaccacaaaagatcaatgaaatgaaaaattggtttttcaaaaagacaaacaaaattggtaaaccattagctggactaaccaagaaaaaagagaaaatacctaaataaataaaatcagaaatgaaaaaggagatatgacagctgataacacagaaatacagagtatcattagagactttgtatcatgaagaactgcacaccaacaaattagaaaactagaggaaatggataaatttttggacataaacattctaccaagattgaaccaagaagaaatagaaaacctgaacagaccaattacaagtaatgagattgaatctatgaatttgtaataaaatgtttcctatcataaaaaggcccaggacccaatggctccactgcagaattctaccagatatttaaagaactaataccaattctcaaactctcccagaaaactgaaaagaagggcattcttccaacttattctataatgccagtgttacttcaataccaaaaccagacaaggacaccagaaaaaaagaaaactataggctaatatacctgatgaacatagatgtaaaaatcctcagtaaaatagtaacagactgaatccagccgcacactggaaaaataatttaccatgatcaaatgggatttattcaagagatgcaaagataggtcaacgtacacaaatcagtaaatatgatacatcacattaacagaaccaaagacaaaaaccttatggtcattttaataaataccaaaaactattcaataaaattaaacaccttttcatgatgaaaattctcaacaaattggatatagaaggaaaatacctcaccatgataaaggccatctatgacaaacccacagccaacatgatactgaacaaggaaaagctgaaagctatttctctaagatctggaacaagaccaggatgcccactttcaccacttttattcaacatagtactggaagtcctagctagagcaattaagcaagagaaagaaagaaagggcattcgagttagaaaggagtcagttacattgtccctgtttgcaaaagacataatcttatatatagaaaactctaaaagctctaccaaaaaactcttagaactaatcaatgaattcagtaaagttgcagaatacaaaatcaatatacaaaaatcagtagtatttctatatatcaacaatgaactagcagaaaaagaaattaagaaagaaatcccatttacaataactacaataaataaataaatacataaaacctaggaataaatttaaggagatgaaagatctctacaaggaaaactataaaacactgatgaaagaaattgaagaggacacacaaaaaaatggaaagacagctgggcatggtggctcacgcctgtaatctcagcactttgggaggccaaggcaggcacattgcttgagctcagtagttcaagaccagcctgggcaacatggcaaaaccctgtctccaccaaaaatacaaaataattagctgagcatggtggaacatgtctgtagtctcagctatttgggaggctgaggtgggaggattgcttgagcccaggagacagaggctgcagtgggtcgagattacatcactgcacttcagcctgtgtgacagagtgataccctgtcaattgttgatttaaaaaaaaaaaggaaagatatctcatgttaatggattggaagaatgaatattgttaacttgaccatactaccaaaagcaatctacagattctgtgcaatccctatcaaaataccaatgacattattcactgaaatataaaaaagcaatcctaaaactaatatagaactataagagaccctgaatagccaaagtaatcctgagaaaaaagaacaaagctttaggcatcacactaccagatttcgaaatatactacaaagctataataacaaaaacagcatggtactagccataaaaacagaccaataaaccagtggtacagaacccagaacccagaaataaacagctatctgatatttgatgaaggtgccaggaacatttattgggaaacggactatctcttcagtaagtagtgttggaaaaactggatagccatatggagaaatgtgaaaacagacctctatctttcaccatattaaaagtcaactcaaaatggattaaagacttgaatagaaggcatgaaattatgaaactattagtaaaaagcctaggggaaacactttatgacagtagtttgggcaaagatcttatggagaagacctcaaaagcacaggcaaaatagacaaatgggattatatcaaacaaaaaagcttctgcacagcaaaggaaaaaaatcaacagagtgaagagacaacgtgcagaatgagagaaaatatttgcaaactattcatctaacaaggaattaatatccagaatatacaaagagctcaacagcaaaccaacaacaataacacataattctatttaaaactgggcaaatgagctgaatggacacatctttcaaaagaagacaggtacatgaaaaaatgcttaacatcactaatcatcagggaaatgcaaataaaatccacaatgagatatctaaacccagttataatggctattttcaaaaagacaaaaaataaatgatggtgaggatgtggagaagtaggaactctcttacactgtttgtggaaatgtaaattagtgtagccattatggaactcaacatggaggttcctcaaaacactgcaaatgaaactgccatatgatccagaaattccactactgggcatatattccaaggaaaggtaatcagtatgttgaagaagtatctgtactcttatatttattgtagcactattcacaatagccaagatatggaataaacctaagtgttcatcaacagatgaataaagaaaatgtgatatatatacataatggaatactatctagctataaaaagcaatgaaattttgccattcacagccacatggatgagcttgggggacattatattaagtgaaataagccaggtacaaaaaggtaaatgctgcatgatcttactcacatgtgaaagtttaaaaagttgagcttatagaagtagagagtagaagagcggttactagaggtggggaagggtaaggggaggagggcaataaccaaggattggttaacagataacaaaagcacagctagataggagaagtaagttcaagtgttctatagtaatatagggtgactataattaacaattcattgtatattttccaatagtagaggagaggattttgaatgttccaaatacaaagaaatgatcaacgtttgaggtgatgggtaaaaaaagaatagtgttccatactagattgttatttaataaattcttacctaatttaaaaaaaaactcaggtaactatttatgtatttaatgcaataggcagtagagtagagtgagtgcaggctctgaagccagactgcctccattcaaagcctgcttctcctagttatgactagtatggccttgcttatcctctgtatgttctcagttttcccatctgtaaaatgacgaatagtcccctacttatagaattcttgtaaagggataatagtagtcccctccagtatcagttagttaccccagcaacgctgcataataaatttccccaaaacttagtgacataccataagcatttatttctcaatcacacatctacaggtcagctggagttccactattctaggcttggcttgacttcaggacatcattttggttcaaggggctacagtatcatttatttttgtgtgtatcagtagactagtagggatctgttttactggcagtatctgacatgaaagagagcaagtccagttgcatagttttctttttctttccttttctttgcttttgtttttgagacagggtctccctctgtcacccaggctagagtacagtggtgtgatcatagctcactgctgccatgacatcccagtctcaatcaatactctcacctcagcctcccaggtagctaggattacagacacatgccactatgcctagctaattttttttttttttttttttttagtagagatggggtcttcctatgtttctctagttggtctcaaactcctgggctcaagtgatcctcctgcttggcctcctaaagtgctggaattacaggtgtgagccactacacctggcccaattgcatacttttatttgcatctaatgtttgcacttagcaaacattgactaaagcaagtcacatggctgagcccaacaccaatgaggcagggaaggtgaggcggtgggagagaatgagtatttgctgaacagtccagaggtcagcaaactatttcggtaaagagccagatagtaaatattttttgctttgttggccatattgtctctgttacaaccactgaactctgccattatagcatgaaagcagccttagataataatgtatcgacaactagagtaactgtgttccaataagctatatttataaaaccaagcagcagactggatttggctcatgggtcatagttttccaactcctgactaatttaccacatcagctcatagagtttttatgaggattaagtatattaatatatagaaagtgcttttaacattcctctacagagtagcactaataaatattggctttcattaatattgtttgttatcactatccaatattatagcacaatattggaaataataaaaatgttcaacaatacagatagggttagataagttatggcacacctgtgctgtaaaatgttatacatccatttaaataccaaaaaaaaaattgatatttaagtggatgtataacattttacagtatgggtacagtggctcacgcatataatcctggcactttgggaggctgaggcaggccaattgcttgagcccaggaattggagaccaccctgggtaacatagtgacaccctgtctttatttaaaaagaaaatttttttaatatcaattttttttttagacagggtcatgctctgtcgcccaagctggagtacagtagcacatcatcacttactgcagcctcaatctccccagctcaagcaatcctcctgcctcagccttccaagtacctgggactacaggtgcaagccaccgtgcctgggtaattttttattttttgtagagacagggtctcactgtgttatccaggctggtctcgaactcctggactcaagcaatccacccaccttggcctcccaaagtgctgggattacaggcatgagcctctgtgcccagtcttaaatatcaattttttgaagatatatcaacactatataatggcataagaacatgtttatgttaaatgagaaaaagagataagtaatatgtatcatatgaccccaactttatttttcttaaaatataatatattttaaacatggaaaacagctaggaaaggaatatgtcaaacggtatcatttagttttttaatataattctttattgtccattttttctccactgggcataacaatctggcattatttcaataagaaggatggaatctgactgagttcactgaaaactcttctagctctaatgtatttatcattttatattccacttatgttttaattgcttaacaaactaagtatttaccttcagagatggctgattagaatggattagatgggactgggcacggtagctcatgcctataatcccagaactttgggaggccgaggtgggcggatcacctgaggtcagcagttagagaccaacctggccaacatggcaaaaccccatctctactaaaaatacaaaaattagctgggtgtggtggtgcacacctgtaatcccagctacttgggagactgaggtaggagaatcacttgaacctaggaggcggaggttgcagtgaactgagactccagcctgggagacagagtgagactccttccaaaaaaaaaatgaattagatagtcactttccaatttttgttgttgttgttgttaaagaaatgttgttctgttctgggactcctggaaatctatgtcagagtaccaaccaatgggaatagcatctcctcactgattctcaggctgtatcaacagtagctcctttgggaccacattccctgagcaaccacagtcctttcagtgataacaaaggcagaatactgacacttggaggtgaacaacctcttccacccctccctggtctcttcagtatttggacatatacctctgctttttttatgtatcaaggggagattatgtttcaatatttaattaccatgtgtctaggagtcacatgaataaagactggaaaggaagcttcagaaacccgtagcctctttcaccaatctcacagaatattagcaattaaagttaattattttttaaaaccctttacagtaataaagttttatctaaattataatcagcccctggatactccaagagtctaagctgtgttgaaaattgttatattaataagcttgtaagtccttagaagtaactactccaagtaaattttgccctaaaatatgctttagaatctgaagtataaaaggaccatgcattctcatctccaagtttaggtaaaacagagttaaactttatttttagtaattgaatcattagtgagtttaagtgccaattaggattcccatcaaagatttgtgtatggctattgtatgttttagtaagcactagatccaatgtggcatgttaggcctaatcaaagggagaaatggacacctgatttgcccattaatcttaactgaatcttcagttaagattctgatgctggaatcttaactgaaataataaggtaatatgaattctattatatccatatctcaaggagttgtttttttttgtttgtttgttttaagacagggtcttgctctgtcacctaggttagagtgcagtggtgtgaacatggctcactgtagccttgaactcctgggcttaagcaatcctcctacctcagcctcctgtgtagctgggatcacaggcacgtgccatcacacccagctaattttttattttttattttttgtagagatggggtcccactttgttgcctgggctggtctcaaactcctgagctcaagcaatcctcagcctcccaaagtgctgggattataggtgtgagccaccgctcttaatatcatgaacaatttctaatactttggagttctttatcatggaactttgtgtacacagcaaaagatttgctgatagttattgagcccatcatatggaatgagaactgttttcagtcaacttaggcataaatacatgtgactacaaatactattaatggattctaatagcaacttccagttctcctctaaggcagaaggaagaacccttaattagaatggctaagaaagctgtctattctggttgagatgtccccagtgcttttctccttacccctagaccctgctttgctgatcctcttctggggtggtagctagtctccaaagaagacccctcagtgagccatgcctactagtagtcatgcccttatgtggtcctctcctatattaattctgagctggccatttctaaccaaaagaattctacagaaatgatgcagcctcccctttgctgtcttggaacactcactctgagcaaagtcagccatcatgtaagaagttcaattaccttgacaccaccaaactttgaagaatcccagctagccacataaagctgttccagccacctaagttgagaggttggacatgtgaatgaagaagccatctgtctgcccatccaacccacatagtccttcagatggctccagtcttgatcacaaatgcatgagaaccttaaagagcttagcttagtcatcatccctcagaaccatgagagacaaatagatagttattttaagcctccaagtttttagatggtttgttatacagcaatagaaaatcaaaacacttagtttttttacttatccttgtccttctgcactgggatgttgaagatccctatgatgagttctttttacctgcaattgcaaatgccaacattccttttatatatagattgctagtagaggttgcatcttcctcctatatgctctgtaagatactggctgtctaattgttaattaaaagccatctgcatgcctgcttttttaaccctagagatgccttttatgttttcttagccttgaagctctttcaatatgtgcctggcctgtgttctctaaagcagcagcagcaagggaaaggattatagtcttcagcttttgccaggagaagtcacttcctcagtggctaagacctagaattgcacccaccccagggcatgtctgtgacacttcctgtgtaaaatctttagacttcctcctggcacaaccgagttagagccaaagctgtttaacattctaagcctaatatcacatcagcatgtggttgaattatatgtttccaaagtctctttcaaacattctaagtctatgattttcaggaacattgtatataatatgtgggatacacagagtgtctcctgcggtgactggcacagaatgcagctccatattatgtggattttttttccttacagaagttgaagagaaaagtatacatttttaaatctttatattgtttgtatataaaagtataaaaattgcttactgaaaaatcagtggaatactctacagcaaagaaaatgaacaaactggctatatgtatcagcatggttaaatctcataatgctaagagaaggatgcaagtcgaaatagaatatgcttctacttgtgtaaagttcaagcaatcaacatcaaactctgcattatagggttacatgatcagtggttaaactacttagaaaagcacataaacaaatgattatcatggtagtcaagagcatgttgggaggataggggtcagtgagggtgttagaaaattctgggggttttatttatttatttttttgagacggagttttgttcttgtcgcccaggctggagtgcaatggcacgatctcagctcactgcaacctctgcctccctggttcaagtgattctcctgcctcagcctctcaagtagctgggattacaggcgcatgccatcatgcccagctaatttttgtatttttaatagaggtggggtttcaccatgttggccaggctggcctcgaactcctgacctcaggtgatctgcccacctcggcctcccaaagtgctgggattacaggcatgagccaccacacctggccagaaaattctgtatttttacccaagtggtagttatttagatatttgctttataattataatgtaagctatatttatatattttaagtaattctgtgttaatattttacagttaaaaagatttttaaagcatcaagagacttgtagatcttagagacatttaaatatgtacattaaacacatatatacaaatagttttttctaactaaaaaagtaatacatatttgttatagaaaattaagagaagaaaaataaaaattatccataatcccaccacctcttgacattttgagataacaacccttaatgttttgtttatttccttgcagtttctaaagttttttggtgatttctctttctaaaagccaaattgggaacatatcatacatgtgattttgaaagcgaattttttttcacttaatatatcacgagctattgcttttacttagacacttctttgaaatagtgttttaccattgagcctagtcacaggcttgagagtcaccccatgcaatgaattccctagttgttcttggcattttgttttgcggtcagcctctaagcatgtgaaaattatctgctttttattgaaactttatttctagagttttcataaaatcaaaacacagaatatgctcctgcaaataaaatctttaaacttgagatcaaagaataattcagattctttctataaatcctaaaattcacctcttaaaaagattaagaatgctaaaactctgaccagtagactcataatgccttttttttttttttttttgagacagagtccccattctcaaaattaagaacatttgtgtatggagtatttaggggtaaagtaaaaggactttgtgctttacatgtttatgaaagatgcagagtattaaaaatagataatagaagtagcctttttttttttttttttttttttttgagaccgagtctcgctctgtcacccaggctggagtgcagtggcatgatctcggctcactacaacctccacctcccgggttcaagcgattctcctgcctcagcctcccgagtagctgtgattacaggctcccgccaccacacccagctaattttatggatttcactgtgttggccaggctggtctcgaactcctgacctcatgatccgcctgcctcagcctcccaaagtgctgagattacaagcgtgagccaccgcgccccgccagaagtagtttttttgtttgtttgtttgtttgtttgtttggagacggagtctcgctctgttgcccaggctggagtgcagtgatgcgatctcagctcaaggcaacctctgcctcccgagttcaagcgattctcctgtcccagcctcccaagtggctgggattacaggtgcacgccaccacgcccagccaattttttttgtatttttagtagagacagggtttcagcatgttggccaggatgggctctatcctttggctccatgatcctcccacctcagcctcccaaagtgctgggataacaggcgtgagccaccgcgtggccagaagtagtcttaaatggctaaattttggttgttgcctctttctgcctatttttaaaacttaatgtaaagttacaaacaagatcaaaaattttcagatttgttttgaaataagttatcacaatgaaatcaaacgatattttaaaagaagaaaaactattactattttttagagtagaattggcattttgtgtcatcgtgggcttacaataaaatattggcaatcatttactctagtgataactgcttctgttatttccagacagatgttattatatttttaaaattactaatattttatgcattaaaggctaatataagataaaatgctaatgtcatacaaatttagctctttcaaccccacagtttttgttttcattttattgtgtaactgtaagtttctcaaacacattttgggcctgataatgctttgctgtggggggctacattgtacattgcaggatgtttagcagcatctctggctgctaccccacaagatttcagtagcagcctccagttgggaaaccaaacatgtctccagacattgccaagtgtcccctgtggggcaaaactaagtccatttgagaatcactgccatagtgtatttacaaaaattcttatcatgcttttcaggaacaaaattaggaaaaaagcaacataccattactagctaggcacacaatctgccgaacaaaaaactgctgggcagtcattgtgaatagttcagcataaataaaaaggtcagactacatttcttaatcaaagactacattatctaggtaattggtacagaacagaccactagaaacattttagtgagtggcacacagggaaattaaattggttaatagctacagatgtaatttatggctctttcttcaatcattatttttaaatgtgaggctgcaggatctgcagatattaaaggacgcatgaaggtccttttactactttgtgttacccccaaatcacagcaattctcaatggcatgctgaaagaaaaaggtgtctcactccttttatcattttgtctacaacaggtgatgcccagtgccctgctgggaacatcatcaatctaacttcctctcaaaaatgtttggcattctttgtcatgacaagtaggcatcgggcagtccagttcatagggtttttctccatttaaacatatgccagaggaagtagaaaaacgtagctatttgataggtagagaaaagaaaaatatttaaatattgtcacagaaccattatcacaccttaaaaaactaaaataatcctttactatcatcaagtatactgtcattcttaaaattttcaattgtcttataaatgtcattttttacaggttttcatttgaatcaggactcaaaaaagatacatgtgttgtaattatttgatatatttctctctttttttgcaacagggtctctctgtgtcacccaggctgtagtgcagtggtgcgatcttggctcactgcaacctctgcctcccaggctcaagcaatcctctcaccctagcctcccaaatagctgggactacaggcatgagccactatgcttggctaatttttatttttatttttattttttgagatggagtcttgctctgtcacccaggttggaatgcagtggcacaatctcggctcactgcaacctccgccccccaggttcaagcagttttcctgcctcagcctcctgagtagctgggattacaggtgcatgccaccacactcggctaatttttgtttgtttgtttgtttgtttgtttgtttgtttttgagacagagtctcgctgtcgcccaggctggagtgcagtggtgcgatctcggctcactgcaggctccgccccccggggttcacgctattctcctgcctcagactcccgagtagctgggactacaggcccccgccacctcgcccggctaattttttgtatttttagtagagatggggtttcaccgtgttagccaggatggtctcgatctcctgacctcgtgatccgcccacctcggcctcccaaagtgctgggattacaggtgtgagccactgcgcctggcctaatttttgtatttttagtataggcggggttttaccatgttggccaggctggtcttgaactcctcacctcaagttgttcgcctgtcttggcctcccgaagttctgggattacaggcgtgagctcctggctggccttggctaatttttaaattttttcatagagacaatgtctcactatattgtccagactgatctcaaattcctgtacttaagtgattctcctacctcagcctccgaaagtgctgggattacagatctagcctaatatatatcttaaatgatttttaatctttaagtttccccttgcctttttttcccttcttgtaatttatttgttgaagaaactggattgtttgtattgcagtgtttcccacagcctggagtttgctgattatatccttatagtgtcacttacttaagtgtcacttgtgtttctctgtctcatgtatttcctgtaaactggtagctggagctaaaaggcttgatcagattcagattcagttttctttttggcaagtccgaaaagaagatgatagccactgacagtattgttggcttcttgcccagtgacttgcaaattgatttagctaacatttgctgaatacttactacgtgcccagcaatatgcttatgttttataggcattatgtcatttaatcttatttaggttcacaatattagtacatgtcgatttctgtctgatgaccaaacctcttattagagacgagtcatcttaaatatctttcaaacaaaccccatggtatataccccattgtcttttatgtgatttaatttggagtttaatctgaactttctttttacttagagcaatacaaaagtatcttgcattaaggcactttttcattttaataataaagctcagagacctacaattttactgagaactcattgtactcaagccttttggtacagggattcaccatctgttaacctcacaaagatatctaaaccacaaatagggccaatagaattcagtatttcctgagtctctttttcctttgcactcattgtcttctgcaggtgtgcttatgtctctctcatctctttctgcttctttgcatgctcacaatgctcacaatatcctactgttcccagtgtgagaaactggctcgtgattgtaaaagcaaaactagcttttcattgtttgtttacatatctttaatttattctgccgaattctcttcgtagtcctcagttctgctgtttataaaaccagaccatgggtgctacagactcaaaaaataaatgtcaaatagtcttgatcaagtgtcacttttgaagatgaaactgtttgatatgtaattgatggaaaaaaggcatcaaccagcccgagttgcaattagatacaagagcactggaaacaaaacaatgcaaagaggatcctattgtgcagctttacactttgcaagttgatatgcaaagagtaacttatttttaatatatcttaacccttctccagtcatttctcctttaacaattgttagcgtctcctcagtttccagaatatctattcggtgaaacatttggttcgctgaacaagaggaacataaagccctggtgaatacaatagggaaatagaaatgactgtagagcttaatttcttgttctggttgtcagtatgagacattagacaaatagccagattttctgttcttatttctttaaaacaaaattatttttatcatgattttcctaaagacctttaagattcttatgtgaaagagtcttttgtaagcttctagtaaataggaattgtacctctctttacctgatctcacaaggtgcccagggtagcatggtacatgtgcttgtgcctaaaaagtagctttggatgatggtggtatttgaaaggttatacatcttaaaggatattttgttccctttttccttggcaggaccaaggagcttccttttctaagaccagtgctgtttggactcagtgaaagtgcactttgttctagaattgccatataaaagcctggaatatatattgagttgttccaagaagggtgagaagtcgtgttctaggacattgaatgctgatttggtgctgaatgaatgatcgttatgttcttttttactcacaggctcgcttctcatatgtgcggatgaaatatcttttcttttcctggttagtggtttttgttggaagctggattatatatgtgcagtattctacctatacagaattatgcagaggaaaggactgtaagaaaataatagtaagtattttaaatttcctgtttactaaaaagcctcttcataacactatatttactgcttacatacttactaatgatgtttttaaaaataaaagttaatttgacattagaattgtgctaatcttcttagctttttgacatgacccattagtaaagttttccccactttgaaaattccagtgttcagaaatttaaatatataacacataaataagttagtgtgggggcatcctcaatacaaagaaggatttttattatatatatatatatttttaatatatttaagttttagtttatttcaatcagatgagttttttaatgtttagactataaaagcgtatttacaggcagactttctagaacacatcttttactcttgaataccaaaatttatctaaaaggattattattctgtttctatcctagtgattggatgtatctcagaaaaatgactgtatcagtctaagatttctagtagtgatcattaattctatagacttatattttaaaaatttgagaatttcaagtaaatttaactcctttttttccaccagtactttctctctttttttttttttttttgagacgaagtcttgctttattgcccaggctggagtgcagtggtacaatctcagcctactgcaactgcctcccaggttcaagcaattctcctgcctcaacctcccaagtagctggaatcacaggctcgcactaccacgcctggctaatttttgtattttcagtaaagacggggtttcaccatgttgcccaggctggtcttgaactcctagcctcaagtgatccgccctccttgacttcccaaagagctgggattacaggcatgagccaccgcacctggcctctaccagtactttctaatataaagaatattaaaacactccatctcagaattatatttgaatagtaatgatttggagggttccaattattataacttgttaaagattctatagttgttgagtagctactctttacccaggccagtggtgtatgcatataacagggagcaaaatatctttgaccttataaaacttacagtggatcaggaaagaaaatgagtaattacagtaaggtaagataaataagatagcaactgttatgggaacataagacggaaacctggagcttccccaagttctaagaaaataaaaaccagtttaacacaaggtgcttcatcagttaggatacaaaaacacgttattccacaggagtgttacagtcttttaactaggcaagagaggggaatgagttagtaaagaagagtcctaagtcaaggttcaaagatagcaatcctgtgttcattccaactggccattctagatccttaaggaattttaagataggaggtatctctggggccaatgtactgggtactttacatgttcattaatccttagcataatagtgtacagataaagaactatgacccagagagacaggagaatttgcccaagatgatggaaccagaatttgatcctaattctgtctctctatgaagctcatactccttctgctaccctacatcagaaaagactgacagaagaagttacagtctaataaagctaataaaaccccacaaaactcagtttctaaccttcagtgaagaaggaggaaacaggaggtagataatcaagttcaaaaacatacaaataaccgaaactatttgaaatgtttatttctctttctctaggccacctttctcaaactaggtaccttggagcacattaatagatattccatggataaaatatgtccctggtcagatgtatttggaaacagagggttaaataaagataacaactgactttactaaggacttcttaggttcttttagatactaatatgtgttatgcatctccaagagacagcaaatatacttgatcagaaaaaaccatatccccaccacagccctcccaggaagacctgttaacatcatctggtaatgttagaaatctaagagattaagacaaaatgaagtggatatgcttttaaatatcttgtatcattacagtatccttcaaatgtagggcaaatattggtacatattctgtcatgagtaaattagagttgaagtgcttcattacttttcactttaatttaatttccctttaatttataagaaaggaaaccagaacataattctagcataatttaatggttattttatcaaaccctgaagataatgaaagagctttctgagtctaaaatacatcattttcctaagactggcttttaaaaaattatagttattctgcatttgggattatgttcttaaaacctatcataagtagtagtactaaagtcaatagtactaagctaagatagtactaatattgtatcacaattgtgggattagaactaaaaagcaagcagaaaaaatattgttaaagtatattttagccaggcatgatggcatgcacatgttgtcccacctacttgagaggctgaggtgggaggatcccttaaatccaggaatttgagattgcagtgaactatgatcctgccacaacactccagcctgggcaacagagcaagacttcatctcaaaaataaaataacttctttaaaagtatattttaaagcctcaaagtgctaacaagatagggaggaattacttgatcaagacctgggagaggataagattttttttttttttttttgagacagagttttgctctgtcacccgggctgcagtgcagtggtgcaatctcggctcactgcaacctctgcctcccgggttcaaatgattctcctgcctcagcctcccaagtagctgggactacaggtacccaccaccacacctggctaatttttctatttttagtagagatggggttttgccatgttggccaggctggtctcaaactcctgacctcaggtgatccacctgcctcggcctcccaaagtgctgggattacaggcgtaaggcaccacacccagccgagaggataagatttgaaagaggtgggcctagtttttgtggctgcttttcactggtgatgtatgatctaaaattgaaatatacagtcttaaggggctagggtaataaaaatctactacatccaaccaaggatgggaacactggcacaccatgctttgtgctgagaccttaaaggaatgaaccccaggagtaaaggtaaactaaaagaatctcagaatggtgagctgacttttatggcctcttttaccctggggggaatttgctgattctgggcatgggcagggatctgagaagcagaaaccttatgttggcggaaagcccctactggggacaagaaatcagcagaggctttgtggaaaaccaggggaacctcatgcatacagccagttatcctgttgggatatttgccaattcccggggctctgcagaatgagaggttaaaaacctcattggaaagcctttgaaaagcagaacagactctttggcagtctcacaagatacagattagagttatgaacttgccagaaggagaagccccaatgaataccaagctctcagttaaaaatcctagagggctatatacccttggacataagtagctagagctttacccagagctacaaccaagtctcaacttcaaacagctcctgattttgttaaggtgatcagctaccattacctttgtctgctagacagaaggaaaccctctctggagacattatgtaaaaaagtacaaagaatgccaaaagacaaaataaaatgaccaaaaatcaagagataaacacagatactagaagcagatctccagatgatccagatattaagagttattcaaaaagaatgtaaaaataactttatattcatgttcagttaaataggaataaaggtagaagaaataggtaaaacaatggagaatttcaacagagaattgtaatatataaaaaagaatcaaggctgggcatggtggctcgtacctgtaatcccagcactttgggaggccaaggtgggcagatcacttgactccaggagtttgagaccagcctggccaacatagcaaaaacctgtctctactaaaaatacaaaaaaattagccgagtgtagtggcacacatctgtaattccagctactcagaaggctgaggcacaagaatcacatgaacccaggaggcagaggttgcagtgagctgagatcacatcactgcactccagcctgggtgacagagggagactctgtctcaaaaaaaaaaaaaaaaaaaaaaaaaaaagatttaaagaaaaagaatcaggaaaatagtatggagggttctcaaattgttaaacatggaattaccatatgatccagtaaatccacttctgggtatacataccaaaaaaattgaaatcagggtttcaaatggattctggcacaccaatgttcacagtagcattattcatagtagccaaaaggtggaaacaagccaactgtccatccacagatgaatggataaacaaaatattgtatatagatacaatggaatattagcctttaaaaagagtaaaattctgatacatgctacaacatggatgaatattggaaacattatgctaagtgaaagaagccaaacacaaaaagacaaatattgtatgattccatttatatgctgcaatacctagaataacaattacatataaaatgggagaaggataaaggaagttaaagtgtttaagtccttacaatattgcagagtaggataaaagaatcaaccagttaactttagactttgataattcaaggatgcatattattatttctaggataacctatacaatagaaagagtgtaccatttccaaactaacatagaaaaaatggaataataaaagaataaaagaggccgggtgcagtgtctcacacctgtaatcccagcactttgggaagctgaggcaggcagatcacctgaggtcggtagttcgagaccagcccaaccaacatggagaaatcctgtctctactaaaaatacaaaattagccgtgcgtggtggtgcatgcctgtaatcccagctactcaggaggctgaggcaggagaattgcttgaacccgggaggaggaggttgcagtgagccaagattgtgccactgtactccagcctggtcaacaagagcgaaacttagtctcagaaaaaaataaataaataaaagaataaaagaatagtcagtccaaaggaaggcaagaaagtaaagaaaaagaacaggcaggataagtaaaaataaatacataagatgaaagatgtcacagattgaattccctggaaagcagacttagagactaaggtttgcctgcagcaagttgattaaattcggctcttgggattaacatctgtagagagtgaggaagcagagttaagtcagagggaaaagttgaactacactgcagtagtaacaaaggccttaaaggtcaacgctacagggaattctggagctgggatgaccttgcaaaggtccagacctttatccccctcactgaccagtcagtggaagcagattcccacctttaccccgatccatgccaaggagatatgaccttgagcaaggctgtactctagctgagggcagtcctaaaggactcagctgagagctgtttactacctgtactcccagtgctgaaggaataagtgctccagtcctggagaaggagatttgggtggcttaccatggcatcagatgtagtatatttaaacccacatatgatggtaattgcagtatgttatcagtggaccaaatgatttagttgaaagacaaagattgtgaggctgtatttaaaaatcaaaatccaggctgggcgcagtggctcacgcctgtaatcccagcattttgggaggctgaggcgggtggatcacctgaggtcaggagtgtgagaccagcctggccaacatggtgaaaccccgtctctgctaaaactgtaaaaattagccgggcatggtggtgggtgcctgtaatcccagctacccaggaggctgaggcaggagaatcgctggaacctgggaggcagaggctgcagtgagctgagattgcaccactgcactccagcctgggcaacaaagcaagactctgtttacaaaataaaaatcaaaatccagctataagagagacatctgaaatatatgaagatgttgaaagtaaaacaatatgaagccacttatgcaaatatgcaaattcttggatgtttggaggagagcaacagatatgtgtgtgtgtgtgtgtgtgtgtgtgtgtgtgtgtgtgtatataattcatgtaagttttttattgcagattatacctttttttaaagtctaatcagcccttcctaacttgaaatgtaatatattttaaattggcttctcccatggttcagttttacaatagctgcctaagtaattacctggccatttcatgaattatggcaatatccacacatacttctggtcctggtcattactgttttgaaatgtggagtctaaaccgattgcctctctccctctgtattagtgcatggactgttctttttttaagtggattgaagagaaccaaagcgtataataaaattgctaattttgaattttaggtatatatatataaaactgcataatcttaaagtcatgcttagtaaacacatgctcatcaaaggattacaatatcctgtgtataacctttgaacagattccgttcaaaatcttcagtcaatttcatctttgtcaactaaagaagattataaagagacacagaagatccaaaagaggttccacaaatattatttgctaaagttttaagttttaaagtgtgggtccttttattctcttcaaaagttggcaaaatctttcctttagcttatttttcctattcttaataatttagtcagcaccaggcatggtggctcacatctgtaatcctagcactttaggaggccaaggtgggaagattgcttgagcccaggagtttaagaccagctaggcaacatagtgagaatccatctctacaaaaaataaaaagttagctgggcatggtggcatgcacctgtagtcccagctacttggaggctgaggtgagaggatcacttgagcaaaaggggtcgaggctgcagtgagccatgatagcaccactacactccagcctgggcaacagaatgagaccctgtatcaaaataataataataataataataataatagtgtaatatttattttcaaggtaactactgtcatatagcaatcatataaaaagtataatccattttagaagaggtatctatcagtcagttaaatatttattgaacatctacatctaagttatttttctaggtgctagggatattgtggtaagcaagatagaatgccttaggagctttttttttttttttaagattgagtctcactctgtcacacaggctggagtgcagtggcacgatctcagctcaccacaacctccacctcccagattcaagcaattctcctgcctcagcctcccaagcagctgggattacaggcgcctgccaccatgcccggctaatttttttatttttagtagagacaaggtttcaccacgttggccaggctggtctcgaactcctgacctcaggtgatccacctgcctcggccttcaaaagtgctgggattacaggtatgagccaccgcacccagccaaggagcttacgttcttattgtggaatgtgtataattaaaaacaaaaacaagtaaataaataaggtactgacaagtgcaatgaaaacatatgtaatagcaatgtttcgtagagaatggctagggcatgctgtcttaactggagtgattgggaaaaacctgcctgaaaagatggcattttgaattggaaggtgatgagaggaagcaattgtgtgagaatctaggcaaaaagcatttaaagagaaaggacagtgaatgcaaatgcccaaagaagggagcttgaggaacctgattgctttcatatatggcttatgaaaatctgtcttattactttagtaacaccatgtacgtttttaaatgttagatattagtggtacaaccaacccactgtgaagaacttcttgattactagcagctaaaccatatcatgttagcctgttggaaaaaatgctaggctgaagtgaaagccccagcctcactttttcttgtgctgtactgtgtagctttgagtaagtgattttatttcattggcttgctttaactacactatacaggctcgagaaaagtatctctgtcctacctgcatcacagattttatgaagataaagtagaattgaaccaattaacctgataatctaacactgattgatgctctgacatatccgttgaacatagagaaggttctcaagtccttgacttttttcatttgatctgagacaagtaccccattacttgtcattgctgtaacatagcattgtaattcaaaaatttcctggaagattgctgtagctgttccattgagagcattgcctccaagctgaaatcattgcttaggagttagggaggacagattatcaacaaagtgtaataagcagtttacggccgggcacggtggctcacacctgtaatcccagtgctttgggaggctgagatgggcagatcacttgaggtctggagtttgagatcagcccggccaacatggtgaaaccccatctctactaaaaatacaaaaattagccaggtgtgccagtgcacgcctataatcccagctagtcagaaagccaaggcaggagaatcgcttgaacctgggaggcagaggttgcagtgagctgagattgtgccactgcactccagcctgggtgacagagcaagaccctgtctcaacaacaacaacaacaacaacaaagtttatatctgtttaacagttgtggtctatcttgtgttccatagctttcttctctgcatgcctctgtctttttctctctctctccatttgtgtgtgaagggtcccatccattgcagtagttaagagcataagaattggagtaaaagggccaggcgcagtggcccatgcctgtaatcccagcactttgggaggccgaggcgggcggatcacgaggtcaagagatcaagaccatcctggccaacacagtgaaaccccaactctactaaaaaaaaaaaaaaaaaaagaattggagtaaaagaactttaggtttcagttccagctttgccatttctgagctgtataagttgggcaaattatttaggctttgtaaatggagattaataatactttcatatcaggtggtcgtaaggataaaatgagttcatgtattgaaagacaacactgtgtctgacacatggtaaatgtacagtaagttattattgttatattctcaagttccgcccttcagtctgactgggaagataagacacacacacacacattatttaatcaggtgtatcagtcaggattcaatcagagaagcaaaagtgatataaagagatttattgtaaggagttggtttatacagttgtgggagctggctgggcaaatctaaaatccatatggaaggctatcaggaagggcaggctggaattctcaggcattggctgaagctgctgtctacaggcaacattttttcatcaaggaatcctcagtggcgctcttaaggcccttcaactggtagaatcaggctcacccagactatctaggatactctctcttaaagtcaactgattatgaattttaattacatctgcaaaataccctcacagcaacacctagattgtttgttttgataactgggggctatggcctagccaacctagttggcagatcaaaagaccatcacatcaggttaaaatgatttagtttgtacggtaaatagttgtactacaaaaatgtaaagaaagaaaggatctatgaatagggagattattttagatagaatagtggggaaaggcttcatagaggaggcagaacttctacagggccttcaaggccaggtgcggtggctcatgcctgtaatcccagcactttgagaggccgaggcgggtggatcacctgaggtcaggagtttgagaccatcctggccaacatggtgaaaacccatctctactaaaaatacaagaattagccgggcctggtggcacatgcctataatcgcagctactcaggaggctgaggcaggagaatcacttgaacccgggagacggaggctgcagtgagctgagatcacgccattgcactccagcatgggtgacagtgagagactctgtctcaaaaaacaaacaaacaagaaaaccccagacttttggaggtttctttttatatctgattaacactagaccagagaattcccagaactatgtattagtagccactgaaccacagccttggttggggcttttaattgactataaattaatatatttttctcttttgtctttttgtagtaaattctaaaaacaaacagaatgttgaacaaattatatatgcatttcgtataaattatgtacagtgcatattaatctattaatcaagtatatcgtttcaacattggaaatcactatagaatattaatattattttcctgagatgttttctctaaccaatggataatgtttgttaaaagatttagggtaatgctataaggtaggaaccagaactgagattaattttgcacactgtacattagtttgcaatttgaattcaagtttactgttttcagttttagtaaaaatatgaaactttccactgtcatcatccattatttagggcttgactctagtgagatggataataggcttttaaaactccaagaagggaaatggagtgggaatggtacacccagaaaagccaatgttaacttatgaaagttgtaggcaatgagaactgtctaaaaatgagagcaacaactaaccctaattagatgtgcttggaaaaatccattttttttttcacttgtgcttttttctttttccatcaagctaattatataatatggtggaggaggggttgctttttttgttttgtttggagacaggatccctctctgccacccaggctggagtgtagtggcaggatcatagctcactgcagccttgaattcctgggatccagggatcctcccacctcagcctctcaagtagctgagactacaggcatgagctaccatgcccagctaatttttaaaatttttattagagatgggttatcactgtgttgcccaggctgatctccaactcctgcccttaagcgatcctcccacctagatatcctgagtagctgggattacaggtgtaagtcaatgttcttggctatatagtatgttatatcttttttttttttttttttttttgagacggagtctcactctgtagcccaggctggagtgcagtggcgcaatctcagctcattgcaacctctgcctcctgggttcaagcaattctcttgcctcagcctcctgagtagctgggattacagacacacaccagtatgcccagctaatttttttgtatttttagtagagacaggattttgccatgttggccaggctggtctcaatcccctgatctcaggtaatctgcccaccttggccttcccgagtgctaggattataggtgtgtgccactgtacccggccttgttatatcattttttttttacattttctctgattatagaaatcactaatttattcattatttcagcaaatcctatttggtgtctacccataaagaaattttacagtttgactttgtaagtaagatttgtaggtaagattctcttgacatagcatattttgtttgttgggttctttcataaagggaaaaaaagaagcagagaagaatatttcccttctatacatttctcaggaccatattgtttaatattgatctcttctgacatattcctctatgcaagcaagttctaagtttctacctgggtaataatgaggaattactcactacattactctagcaaacctttgtggccattatatgagcacatcctttaaatggaagtattacaaaataaaagggcctctaaatgttattacagtctcttatgaaatttgatttgttgggtaatggtttattgcttaaagcaactaacataagatatactaaatttaagatatttggaaccatgttttcaattagatagtgatatatagctaactgtatttcatttagctttgcctttgcttaggatcaattattatttaacttgaaaagtttcttttctgccattatcctgtgttttttaaatatactgaaccagtcctacttggaacatactgggtttttttgttgtttttttgtttttgttttttggtttttttgagatggagtctcgctgtgtcacccatgctggagtgcagtggcgcatctcagctcactgcaaccttcacctcccgggttcaagagattctcctgcctcagcctcctgagtagctgggattacaggcatgggccaccacacccggctaatttttttgtatttttagtagagacggggtttcaccatgttgactaggctgatcttgaactcctgaccgaccttaagtgagcctctcctcggcctcccaaagtgctgagattataggtgtgagccactgcacctggccggaacacactgttttaaagtacaagcttttttccttttaagaaaagtatagcccttttccctttataccaacttaagtctttatgaacttataaaaaatctattaaacagatttatttgaaatcttaacacacataaaccctattctaaggaaatctctattttattttaatttttgtgggtttttttttttttttttttggtagagacaggggtctttctatgttgcccagcctagtcttgaactcttagcttcaattgatttcccccacctcagcctcccaaagtgctgggattgtaggcatgagccaccactgcccggccaatcttaaatcatagtagcacttctggtggccttcatgtcttatgctacactctcttatattttgtgatatttcttgtaatcctgggacaggcagtatcactgttaggattagctcattcctgtgaagcaagaaagagactaagggttaaagccaacttagaaaagacaagccagcaataaaacatttgatttcagttaaatatttattgtctgcttactgcactgtgcttgagcctggggatacagagatgagaggtatccctgccctgaagatgcttacagactagtaggggatatggaaaaataaaaaggaggagcacataagtgagactgggattagggttgctagatgtagcaaataaaaataaggatgctcagttacatttgaatttaaaataaactaggactaccttgagtataagtatatcccaaatattgccaataaacaacaataatttttcagcataagtgtatcctaagcagtattttgctcggcaaccctaatgaagaaggtcccagaaggctttctggaaaaggttacatctgagctgaattttgatgaatgagcattgcagacagaaggaggcatgtgcaaagctacaaacatgagaaataatgctacattccaggcatagcatagctagagcagagaagatgaacggcagtttgcagaggtgaaggaagcagggtcaaactcataacagaccttgtatctcatggtaaggagttcgccttttaccttcagagcagtagagagtcagtagaagtttttaagcagggaagtgactgatccgatttatgttttagaaaaattttgctacttgtagtggagagggtggattagacaggagacagcacaagcagggggatctgttttatggcagttgtaataatccaggcacaagtgacgagggtttaaactatggcattgacaatgggaatggaagggatgaaacagcctcaaaggatatgaaggaaataatttgattgccagcaattggtgaccagttgagtttggggaaattgggaagaacaagaaatttaggacaactcactgcttcctccctcggtgcctaggtggttgatggcaccttccactgaggcaggccatgaaggaggacaaccttgggacagaggagggaagggtgtgatgggttcagtctttgatagattgagtgtgaattgcttttaggttatccaaatcgaggcaagagatgttcagggagcacttggatatttaattcacgaaaaaggcctaggctgggatagagccaggattcctcagagctgtgggaatgtcactgatgatggtatacagagaacacaaggaaaatggaacaaaaccctggaaaacactaatacttaagatggtgagaaaggaagagaattccataaagaacactcataaagagttgccagacaggtggttcacttgagctcaagagtgcaagatcagcctgagcaatatggcgaaacctcgtctctacaaaaaatacaaaacttagccgggtgtggtagtgcgtgcctatagtcccagctacttgggaggccgaggtgggaggatcacccgagcccagggaggtcgaggctacagtgaggcataacgccactgcactccagactgggcggcagagtgagaccctgtctcaaaaaagattgaaaagagttgctagagaaggaggaggaaaatatgaagagagaagccataggaaagagttttaaaacagtgtggtcaaccaggacaaatgctgaaggaggttaaataatataaggactaaaatttgcaagtcagagatcattgttaaaactgttatgagtattggctgagcgcagcagctcacgcctgtaatcccagcacattgggaggccaaggtgggtggatcacttgaggccaagagttagagaccagcctgggcaacatgacaaaaacccgtctctactagaaatacaaaatttggccatgcctggttgttcttgcctgcaatcccagctacccgggaggctgaggcacaagaattgccggaacccaggaggcagaggttgcagtgagccgagatcacgccattgcactccagcctgggtgacagagtgagaccctgtctcaaaaaaaaaaaaaaaaaaaaaaaaagagagagagagaatagaaaagctattaatatatgattatctgaatagatgcatttggcaaaattcaatcaattcttagcaaactaagaataggagggaactttcttaacctgataaaagacatttatgaaaaacccacagccaacatcttatgtaatggtgaaagtctgaatatataatcactgatattaggatcaaagcaaggatatacgttgtcatttctattccacatattactgaatatcctagtcactgtaataagtcaagaaaaaaaataaaagacatagagattgggaaggagggagagaaggaactgaatccaccgatgtttgatgtaagtgaggattaagtacccccatgcaaccttattactaggttgtaatgaaagcaatttctgctagacatgtagacatttattcagtcataaaacattttatttgcaataaatatatttattttcaagcaatcatgaaacatttcatataatctgcctgtaaacttattaaagttctaaccctgcctttttttttcttttttttgagatgcagtcttgctctgtcgcccacgctggagtgcagtggtacaatcttggcccactacaacctcctcctcctgggttcaagcaattctcctgtctcagccaccccagtagctgggactaaggtgcacaccaccacacctggctatttttttttttttttttttttttttttagtagaaattgggtttcaccaagttggccaggctggtctcgaactcctgacctcaggttatccacctgccttggcctcccaaagtactgggattataggtgtgagccactgtgtccggcccccaagtctgcctttttaagtgctctatcaacttgcatgaaagatttagtcaagacaaaaccaatgatacttcaaaggcaggcttgtgtttccttataattagcatcaggccactagaaattctgaaccaataattctcagtacgtggtctcttaggccagcgtgggcacttaaaattaatgcatattttcagcctaatccaagacctactgagtccagaaactctgagacaggtccagcaaactgtgttttcatcagccctccgtgcaatctgaagctctctaaagtttgagaacctctaactgtaaaactgttagctccaggtacctccctaaaggtaaagattatagcctcaactagttcttaaaacctcttcattaaaaggtatggaatatctcatatttcagccaatccacaacacatatcttagatacctttaattttaccagttatcattcatttgtaatatttatccatccatttatcatgctatttaacaaaccacaggccgggtgcagtggcttatgcctgtaatctcagcactttgggagaccaaggcaggcagattgcctgaggccagtagcttgagaccagccttggcaacaaattgacacaccatctctactaaaaataaaaaattagccagggtggtggcatgcacctataatcctagctacttaggaagctgaggtgggaggattgcttgagcccaggaggtcaaggctgcagtgagctgtgatcatgccactgcacttccagcctgggcgacagagtgagaccctgtctcgagaaaatgacaaatttcaccaataaaagccagatttcctaattaacaagtctcagaaattgaccaatcttgatcaaagtaaggagataaggaatatagaagcgcttggagtagctgcctcgagcattggcttcctgattacagctctagccaagcacctgtgcattcctgatttggatatgagagacatctggactataacttacacacatatattaaactgtgtgtgctgaggaattctaaaataaattgcagactctattataaccgaaggaaggaaagagtggagaggatgtgtgtgttgcgggcaggggggagagagatttgagcacttttaatggctgagagagagagaggatgagaacgcgaacatgaagtgcaagtctagaaaatggtgaagatttagtatcgttgatacggggaacgggagagggtgttgacgagagacgtggaagattttcaggcattgttaacccaactcagctattttttttccttaggaaaaattgatgagtttgtctgaaatacatttttagaacacacatcttagaaaattacttaaaacctggtagtatacatctgttcattgttattgcccccttgtggtatagtttccatagttgatgaaattattcattcaactagggtgggtttcgtcaaataagactaaagagtgccatctcctggtttgatgaggtatgtgcaggcaagagaggcatttaggagaatcaccggagtaaagaacaatcttaggacaggaaaaacctttgatgttttcgctgatcatcctatggtaaagtgaaacattctctataatttctgtgtctttttatttagaatatcgttttactgacagtaattacagtttgtgtctgtggctgtgcctgaaaaacaacaaaacaaaacaaaacagtacgtggccaaccatcctttctatacaagcatgtgggaaatttgcttttggtttttgatgtaagccacaagtggaagagcctgctcattgtaactacctctttgatgaagggttggcttgagattttttcttagaactagaatttgtcttgtagctgaatgccagactagtctttactgcttcccaataagtttactaatgagctacctggtttgtgctttaaaaaaaaaaagtattaaatattatagaaaagtatgcactttaatcctcaatgagattttaaagccaaagccactatttatgttggttatttaataaacatttacggaacacttaaataccaaactgtgctgtgtgctagagaggaggggaggtttgaagatgaatgtaaccgagtatctgccttcaaatcatccagctttccacaagggaagataacttggacacaaataatgttagatttcagaatatacagaaagaagggaggaagaaaatagtgtcaggaaagaaatataaactcccaagatgattattgaaagatggttgtggaaagagtcatgtttaaatcctgacattgaacagagttaagatgaagtgtttcttaagattcaggagcccaagatcaggacagtggaaggatatcactctttaagtccgatcccatgaattgttcatgacagagggccctacttccggataaaaacccagcatacacttcattcatccatttggcaagtgcttttttatctgtatttgattatgcgtcaggcattgtacaaagtcctcaggaaataaggatgaaagtcctagccctgttgtgagttgcttgtatggagggaatgaccagagacacctttagtgggtgcactcgggaggggtatctgacacagtcggtgctaaacctgctctgcatgctcctctccaacataaataatcctggttctgttactttagtggttaaaagaacaggctctggaggcagactatctgggctcaggttccaactctgccattaacctgctctctgtaaatttcttaccctcttcttaacctctcttgcctcagtttctttatcaataaaatggagataatggtaatacctattccatagggagattttgagaatttaagatatatacatgcaaatctcatagaacagtattggcatataaaaaacaatatgacagccgggcacggtggctcactcctgtaatcccaagcactttgggaggccaaggcaggcagatcgcctgaggtcaggagttccagaccagcctagctaacatggtgaaaccccatctctactaaaaatacaaaaattagctgggcgtgatggcaggttcctataatcctagctattcgggagactgaggcaggagaatcacttgaactggggaggtggagtttgcagtaagccaagaccacgccactgcactccagcctgggtgacaaaagcgaaactccatctcagaaaaaaaaaaaaaaaacaatatgacaaacgctgtgtagctaccaccttcttaacaaatcttaaccttttgccatatttgcttcatttttaaaaagaagtaaaacattacaggtatagttgaagctctcttatcctgcctgatattctccttcctccctctttagaggaatcaccatcttgaatttggtatgagtttttgccatgatgtttttctactttcactgcatgtggcaggggtacataaatactatgtttatgtttgcatatatctaaactttaataaatggtactaaactgctcacgtcattctgaaattgtttctatttcacattatgttgatatgtctgggcctatttatttcattttaatgactgcatagtatttcgtactatgaatataccactttattcaaccattctcctgttgaggggcattaacgttcttacccattttccactctcacaaactgcatctggatggcaaatctcccagtactgcacctagatggcatgctgcagtccttccaagactgtaccctggcctgcatcacatcttgtcttatcttgtcttttctcttcttttccttttctttttttccttccttaaaactaatctctcaagacctggcgcagtggttcacgcctgtaatcccagcactttgggaggccaaggcgggtggataacctgaggtcaaaagttcgagcccagcctgaccaacatggagaaaccccatctctactaaaaatacaaaattacctgggcttggtggtggacacctgtaatcccagctacttgggaggccgaggcaggagaatcgcttgatcccaggaggaggaggttgcagtgagccgagatcgtgccattgcactccagcctgggcaacaagaggaaactccgtctcaaaaaataataataataataaataatagtaaataaactaatcttttatagagttattggcctgctttctttggaaggaaacatttttggttattgattcaatttttatatgtattaatctaattcagcttttttgtttgttcctgtatgactttctattatgtatatttttctagaaaaattgtttatttcaaatgtattaccataaattgtttctatttttttgccaccactactcttttctttcctaataatgtttgtttctcctctttttctcataatcagtcttgctaaaagtgtatcttttttggtaaagttttcaaagagctacctttttatttttatttatttatttattttgagacagggtctcactctgtcactcaggctggagtgcagtggcacaatcacatttcactgcagccttgacctccagggctcaagccatcctctcacctcagccttccgagtagctaggacacaggtgtgcatccacacctggctaatttttgtattttttgtagatacaaagttttgccatgttgtccagtctggtctggaactcctggactcaagtgattcaccctcctcagcctcccaaagtgctggggattatcgacgtgagccaccacacctggcctgattttttttccatttatttcttcatttattatttcttttctcctacttattttgagagtttattttcattattgttgggttttcttttttttttcttagagacagagtctcactttgttgcccaggctggagtacaatggcatgatcgtggcagcctcaacctcatgggttcaagggatcctccttcctcaccctcctgagtagctgggactacaggcacacaccaccatgcctggctaatttaaaaaaaaaaaaatttttagatatgaggtctcactatgttgcctaggctggtcttaaacttctggcctcaagcagtcctcctgccctgatctcccaaagtgctgggattacagttgtgagccactgagccggtctgttgggttttttttgtttgtttgtttggttggttggttggtttttttaagtctctttagttgagcgattatttatattcagtatcttggttttttcgtcattgcgtttaaatttggaaattgctataattttcactgtaagaactgctttggctgcctcccacaagttttgatatatacacttgcattgttgttcacttctaaatatttctgcatttccatggtaatttctactttaacccacaaattatttaggaatatgctttttagtttccaaacatatgtttgtttttttgttttactttttactttttaaaaaaattgtacagttttttggtctttttttttctcttttcttttgcaatgggccatgtttgagctatgggacttcaacttgactttttttcttccacttattttttatttatatgtggtcagagaatgtggtctatatgatatgacttccttggaaaccctaaaccatacctacaggagctttcactcaagctcctcctaatgaggcctcagacttcccatcacctttgcatcaaggaagaaacatgccaatgaaaatgcgggccatctgctaccaagcagatatgcctaacagatggttctgcattttctaaaatatccccagaggttgaccagatggaagaaaggcattgggcctctcccaagtggcctcccaaacttgagtttaagaactagattgctttgctcctctcctgaagatgaaacttaatattcttagctacagacagatctgaaagagaaaccaggtcatagccaagggcttgtccaggaacttctccactactactagctgaagggcaacagcgccttggtgttgacacttaactctgcacatgggcagggctcttgatctctatcaggactgcccatatcctccaagcaaactgtaaggagtattggtaggagggtacaggaggcaggcctgaggagcctgtgccattctgagcaatatacaatagtcattaagagagtgggctctggagccaaactgactgggctagaatcctggctttattattttgtagttgtgaacaaattacataacagatatttctgtttctgttttcttatcttttaatggatattaggttccacctcccagggttgttgtcatggtaataaatgtatagtgctaggaacaatgcctgacacataagaagcacctactatcaggtattatattaacagtttttattggcaggcacagtggctcatgcctgtagatctagcagtttgggaggctgaggtgggaagcttacatgagcccaggaatttgaaaccagcctgggcaacaaagtgaaaccccatctctacaaaaaattaaaaaattaaccaggcatagtggcacattcttgtagtcccagctactcgggagactgaggcaagaggatcacttgagcctgggagatcgaggctgtggtgagccatgattgtgccattgcactccagtctgggcaacagagtgagactctgtctcaaaaaaacaaaacaaaaaaaaatcagtttttattaattcagttacctgagctgtttttattccagtccatttcaactggctttcatgttccatttctccattcatctctttgttggctgaaattccttctctaatcatttcttcaagagatgctcatggaaattatattttctgaaccttatgtgttcaaaaacatttggtgcctactgaaagaaagttcagctatgtaaaataataatagctatgactgagcactttttaaagtcacaggtggtctatacttacactatttaatcctcataaggatgctgtaaattaagacctattaacatccccttcacagatgagactattaggacacaggcgagtctcacttccttccccaaagcctccgctggcattgcaccactgttgtctactattgaatgtggctatggagaaatctggggccaatctgattggtttccccttaaaggtgccttgatctttttgcctggatgctcaaaggataacttatttttgaagtccagtgaacctcagtgggatatgtcacaggggtcattcttgtcagtttttcttgggacattcattgtatgtcctttcaatctatagattaaagtgttttaatttatgtgaagtttcccttgaattctactttgaatattttttcttttccacttgttcccattctccttcagttcccattctccttcatatggacatggtggatatactttgtcttttttatctatacatttatcttaaattcattttattatttttaaatttccatttcattttgcttgcatttctcaaccttgtcctccaaagttttttgttgttgttattgtttttgtttgtttaagacagggtctcactctgtcacccaggctggagtacagtcgtgtgatcttggctcactgcaacctctgcctcccaggctaaagcgatcctcctacctcagcctcccaagtagctagtactacatatatgtgcccccacacccagctaattcttttgtattatttgtagagatggggtcttgctgtattgcccaggctgctcttgaactcctgagctcaagcgatctgcctgcccagcctcccaaagtgctgttattacagggatgagccaccacgcctggcctagtcctcctaaatcttactgtgttttatccctgtctgtctttcccctcatttataatgtggcttttatttctagatgttttattttccttcctgtctgagttctgttagcttattttaaacttccttctattgcctcatcatttcttctgctttgaagtcttattttaaactggttcagtaagtcctttaaattcataacaatatgtttggtctgtttcatagcaacattcttctagaaatttttttctttttttttgagacggagattcgctcttcttgcccaggctggagtgcaatggtgtgatctcggctcactgcaacctccgcccccgcagggttcaagcgactcttccaccgcagcctcctgaatacttgagattacaggcatgcgccaccacgcccagctaattttgtatttttagtagaggcggggtttctccatgtttgtcaggctcgtctcgaactcctgacctcaggtgatccacctgcctcggccccccaaagtgctgggattataggcgtgagccactgcaccctgcctagaaaattttttttatctgacatttgcttttcctattccattcttcctaattcttgtagatttgctgtatagatcttttgcttgtttggttttgattattactcattactgagtgaaatgaggtctccttcagccagccatgtgcgggaagcaactgggcagtgaactgagctggtagtgaagctgcttctggccctctctcccaaccgtagttcatcaacagactgcctccagcaaagagaacatttctgagcattttatcattcaggcctgtcttatcttactatttcatggtgccaaatagagttctgggaagttcccacagcttgtgccccttaaatctttgttgcaaccaggataatggttgtgctctgcagatgtaccacctacttggtgctctgccaactttgtctgagagtggggaccacagcaggtgtttaatctcagcatacttgtaggctctggtgtaatcttcactgaatttggcaggtcatcctcatttattgtgcctagggtttcattggtaccatattttttcagagagtggatgggtttttttccctttcttgtttttgggtgatctcaaggatgacaatgtgacagaggtaactttattttgttattctaaactttatttattttaaaaccagaagtttttttttttttttttttttttgagatagggtctcactctctcacccaggctggagtgcagtggcatgatctcggctcaccacaacctctgcctcccaggctcaagtgattcttctgcctcagcctcccgagtagctggcattacaggcgcccgccaccacgcctggctcatttttttattttagtagagatggggtttcaccatgttagccaggctggtctcgaactcctgacctcaaatgatccaccagcctcggcctcccaaagtgctgggattacaagcgtgagccacggtgcctggcctaaaaccggaaccatttttaaagatagagtgcctctattcttggaaggagtaggtaacataccaccttagaccatgtcatgtgggaaaaatagtttcaaaattctacgcacaccccagcagcaacaagctttctcataatcatataggtataagtaacagagcttagatcaaatccaggtctgtctaagtccaaagcctcagttctttttgtcatagaacttactcataaaggatatagatatctctttatgcttcttcttgtgaatatttttctattaactacttttttatttcctggtttttagtgtgacaagtacaagactggagttattgatgggcctgcatgtaacagcctttgtgttacagaaactctttactttggaaaatgtttatccaccaagcccaacaatcaggtatggccattatgaataaacattccagaattatagtgtactctaattttaccagaaattaaaggcattattaaaagaattcttgaaccaaagctttgagacattatatgtatttcaattttgtatgctttgattcattcattaaacagacatttattttattttaattttttgagacaggatctgttgtccaggctggagtacagtggtgagatctctgctcactgcaacctccacttcccaggctcaagtgagcctcccacctcagcctcccatgtagctgggactacaggctcacacaaccacacttggctaattttttgtatttttgtagaaacagagtcccgccatgttgcccaggctggtctcgaactcctgagctcaagcaatccacccgccttggccttccaaagtgctgggattatagatgtcagccaccacacctggccagtcaaaagatatttattaatctatccccagtatattccagacactgttttgttttgtttttgtttttctgtcagcactttgatgttagatgctgtttcagttaccaggaatacaatggtgattaaggcaacctggtgcggtggctcacgcatgtaatcccaacactttgggaggctgagatgggaggaccacttgcgcccaggagtctgagaccagcctgggcaatgtagtgagaccctgtctctccaaaatttaaaaaaaatgccaggtgtggtggcacacacctgtggttctagctactcaggaggctgaagtgggaagattgcttgagcccaggaggttgaggctgcagtgagctatggtcccaccactgcactccagcctgggtgacagagtgagtgagtgtctcaaaaaataaaaaataaaaataaaaaaatacaaacagctgggcccgtggcacgggcctgtaatcccagcacttcaggaggccaaggtgggtggattgctttagtccaggagtttgaggcctacctgagcaacatagcaaaaccctgtctctacaaaaaatacaaaaattagctgggtggccaggcacagtggcatacacctgtaatcccagcactttgggaggctgaggcggtaggtcacttgaggccaggcattcaagaccaacctgagcaacattgcgataccccctctctactaaaaacacaaaaaattagccgggtgtggtggcacatgcctgtaatcccagcagctccagaggctgaggcacaagaatcgcttgaacctgggaggcggaggttccagtgagccaagatctcacatcactgcactccagcctggacaatagagcgagactgtctcaaaaaatatatatgtattagctgggtgtggtggcacacacctatggtcccagctactcgggaggctgaggtgggacaatcacttgagcccaggaggtcagggctgcagtgagccgtgttcatgtcactgcactccagcctgggtgacagagtgacaccctgtctcaaaaacaaaaacaaaaacaaaaaaaaaccagacaagattgcttcccttacagaccttacatgattccagagggacaggaggtacaaacagttgataaataaataaataaacaaacaaaataattgtagaatatggtgtgttctgtaggagacacagagggcaaattgatagagaatgcagtgtaagggatggtgagaagtgctttagaggatgtgatcagagaagacctttctgaaataatatttgaacttataccttaataaaaaattcataggcatgggaaaaggacaggatgaactaaatcacaaaagaactgcaaacagctgatgaacataatgaaaaaaaattctaccttacttttcatcagagaaataagaataaaacagtagaatatctaattggggtagaagaaaatacaacgaaacatctggagcagtggaaaattgcattttaatgttcatcttatggttcctaaattttcctatataaatatgcattattattatagaaatttaaactaatttttcagttgacagtattaatcatgttaaagacaatttctaaaacaaagtccaacatttgagtgtctcctgcatgccaggcactgtttgaggcactgagggagacagataaagcctctggcctcatgttctaatgtgagatgagacagatagtaatgaactgataaataaataaatatgataattttagacagtgcaaaaggctatgaggataatgaaacagggttagaggtgacctgggggtggaagaggatctcttctagacagggggtcagggaaggctttctaaatgcaatgtctaatctgagacttgaatgatgtaaaggagccagccatgtgaagatctgggagagtacattccaggcagagccagcagcaagtgaagcaggtcaggaagcagaaacaagcttcaacctgtcacagaaagaccagtgtagctgggactttgagaaacggagtacgtggtacaagatcaggttggagacataggcgaggctagctcaaatggagcccaaccggtcatggaaaggactttggactttaattgaaaggggaatttattagagggtttggagcaaggcagtgaaataatgttttctttggattaatattaagaatgaatatgatcttatttatttttttatgtagaagaggggcaacctatcctagtggtaaagacctcagctcttttcagcatgttacttcacctgtatctgcttcagtttccccatcagtgaaataagtataatgatagtacctaccacctaagattggtacaaggattaaaataataacataaatcagtaaaagccaggtgtggtggctcatacctacaatcccagcaacttgagaggctgaggcaggtgggtcacttaaggctagcagttcaggaccagcctgagcaatacagcaagaccccatctctacaaaaaatgtttttaattagccaggtttagtggtacatgcctatagtcctggctacttgggagactgaggcaggaagattccttgagctcaggactttgaggctgcaatgagctatgattatgccactgaaccccagcctgggtgacaaagcaagaccctgtctctaaaataaattagtagaccataggacatagttaacactatataatattagtttgataaataactagatacttaaatagtagttaattctggggaagtgggattatggaagtagaatgtctgggaactttgcttttgccttacatccttctcattggactttttgaaaaatatatttaggcatgcattactcttataatttaaaaaattagtttaaggaaaaaatcttgagtgtgatttcaagtttgcagttcagaaataaagtcacaccttaacctcaatgtttgatgcttgttttgttttgttcagaggaggaggaccctaaaaatatagtagtatattttttagagttttctactcagtataatacataacttgccactcttttttacatagatgtatttagggatttgggataatctaccaggtgttgtgaaatgtcaaatggaacaagcgcttcatcttgattttggaactgaattggaaccaagaaaagaaatagtgctatttgataagccaactagaggaactactgtacaaaaatttaaagaaatggtctatagtctctttaaggtaagcatacccattcatatgttgctagtgtgaagtgggactctttagaggaattggcaggacctcatcctaagccattaaagtgttgatattctttgacctctatcagattctccatcctgaggaaataattataagaggccgggcatggtggctcacgcctgttatcccagcactttgggaggccaaggcaggaggatcacttgagcccaggagttcaagtccagcctgggcaacatagtaagacctcagctatatatatatatatacacgtatatatatatatcatatatatatgtgtgtatatatatatatatacacatatatatatgtatatatatatacgtgtatatatatatacgtgtgtatatatatatatacgtgtgtatatatatatatatatacgtgtgtgtatatatatatatatacatatatatatatacatatatatatatacatatatatatatatatatatatatatatatatatataatgccaggagtggtggcatgtgcctgtagtcctaactacttgagatgctgaggtgcgaggattgcttgagcctgggaggtcgaggttgcagtgagccaagatctcaccactgcactccagcctggacgacaaagtgagaccctgtttcaaaaaaaaaaaagaaaaagaaaagaaatctgtgttggagaatgtttactttaacattatttatgatagctaaaaatgtccagatatgaggagggagttcattaattaattggagtgctgtacagtttgacatgaaaattaattcaaaaaaggtgaaataaaatgagtatactcttagaattgtggctattagaggctgggaagggtacagaggagaggagaataaggagaggttggttaacagatacaaaattaccgctagataggcagaataagttctagtgttctatagcactatagggtaaagggattaataatttttggttattttcaaaaaactaaaaggattgtgaatgttcacaacacaatgataactgagacataaatatgctaattaccttgatttgatcattacaaattgtatgtgtgtattgaaatatcactctgtatcccatgaattttttttctgtgtgctcccgttcacaatacagacaaggcgcagggcctgggctgaggtgtacatgggagttcacctcctcattctatacagtcagtataagaacacagcctggggtaagcaccaggaggcctggggattttttttctttctttctttttttaaaagatggttggttatttgttttgttttgttttggcagggtcttgccctggtgcccaagctggagtgtgcagtggcatgatctcggctcattgcagcctcagcctcctgggtttaagccatcctcctgcctcagccccccaagtagctgggatcacaggcgcaccaccgcacctggctaattttttttttttttagacggagtctcgctctgttgcccaggctggagtgcagtggcatggtctcagctcactgcaaccttgcctcccagattcaagcagttctcctgcctcagcctcccgagtagctgggattacaggcacccgccaccacacctaatttttgtatttttagtagagatgggatttcactattttggccaggctggtctcgaactcctgacctcatggtgatccacccgcctcagcctcccaaagcgctgggattacaggcgtgagccaccgcatccagcatttttttttttttttcagcagagacggtttttttttttttttttttctagcatagacacggtttcaccatgttgcccaggcgggtctagaactcctgagctcaagctatctgcccaccttggcttcccaaagtgctggaattactggcttgagcaattgtgcccatcagtatcccataaatttgtagttattacatgtcactaaaactaacgggaaaaaaagcatagcagttcttcctatgcaaaaaaaaaaaaaaaaaaaacggtactctgcaaattatttttttaatttaaaggaataccaatataggccgggcgcggtggctcacgcctgtaatcccagcactttgggaagccgagacggatggatcacaaggtcaggagatcgagaccatcctggctaacatggtgaaaccccgtctctactaaaaatacaaaaaaaaattagctgggcgtggtggcaggcgcctgtagtcccagctgctcgggagggtgaggcaggagaatggcgtgaacctgggaggtggagcttgcagtgagctgagatcgcgccactgcactccagcctgggcgaaagagcgagactccgtctcaaaaaaaaaaaaaaaaaaaagaaatactaatatatagattaaatagaaataaaacaaagttttagaaaaaagttttattttcattgctcttttattttcactcaaattttttatttggccattttacatgtatttcagactaacggaaatactttttaatcttcattattgtaatactactatttgaacaaaataattattgtgataaatacaaaataggataaaataattaggccaggcatgctggctcatgcctgtaatccgagcactttgggaggctgaggtaggaggatcacctgagcccaggagtttgagaccagcctgggcaacatagtgagatccccatctctaaaaaaaggaaaataatttttagttgacccttattgtaactttgatgtaagtacattacagtacaatttttcaagtccacatatgaggcggtggttttttaatgtatgaatgaggaataattacattgttggttaactatctaaggggcctgaaggggacaggggagttagtggccatttcctaacaaacagacaagtattttaaagtgggttttactgcagttacataaagcatggttctagttcacttaggaagtatcataaatatttggagatataatacattaagttcctgtttggggattcagtaccaagattatttctggcatggttaataatgcccgtaaagaaacttagtatgttgcatgggaggtatttttcattccttctgtgtaactagccaaattcttgacaggcaaaattgggtgaccaaggaaacctctctgaactggttaatctcatcttgacggtggctgatggagacaaagatggccaggtttccttgggagaagcaaagtcggcatgggcacttcttcaactgaatgaatttcttctcatggtgatacttcaagataaagaacatacccccaaattaatgggattctgtggtgacctctatgtgatggaaagtgttgaatatacctctctttatggaataagccttccttgggtcattgaactttttattccatctgggttcagaagaagcatggatcagctgttcacaccatcatggccaagaaaggccaaaatagccataggacttctagaatttgtggaagatgttttccatggcccctacggaaatttcctcatgtgcgatactagtgccaaaaacctaggatataatgataagtatgatttgaaaatggtggatatgagaaaaattgtgccagagacaaacctgaaagaacttattaaggatcgtcactgtgagtctgatttggactgtgtctatggcacagattgtagaactagctgtgatcagagtacaatgaagtgtacttcagaagtgatacaaccaaacttggcaaaagcttgtcagttactcaaagactacctactgcgtggtgctccaagtgaaattcgtgaagaattagaaaagcagctttattcttgtattgctctcaaagtcacagcaaatcaaatggaaatggaacattctttgatactaaataacctaaaaacattattgtggaagaaaatttcctacactaatgactcttagttcatttggacataattaccattttaagaaacctgccacttttaaagaacaattttgagcattaaaaaaaaatggcttcaaattcctgccagttacacaaaactccttccccccaggcctgagaagccatcagtatgtgattactgaagtaatggcaggtgtaggatcaacaggtccccaagatgtcattcctgcccttttagaagccctgttacatctccgaagtacattcattgtgtaactattttgactgactttaaaaaccaatgctgtgaaaagcttcattccataaacatcaacagtgagtgatttgtagatttaccttagccaaaataccaatgctggaagcattgtgtttgcattgaagctgctgttcaacaagaaaatttataaatttactaatgtcttagcatggtaaagtttgcacattaacagaaattaagactgcaaagcaggttaaacttgcttctttataaaacagatgttgggttaatagcatggtttactgtattaaagacttatacacccatttttaacctcattcagacatcaagttatgtgtagcttcacaatggttcaagtggcttacttcaagaaatcttatacttgacagtacaccaattttattgactaaaaatggatgaactttcctaaagattcaaagggcccatcttagtatcacgcagctgactgagcccttcaaaactgacatcttaaggcccaatcaagatccacatatcctgattttgaactatgtgaaagtgggactgtaagtgcaagactaaaataaattatagcagactttttagtaataactttccattttcaaacagtatatcctgtgggccaaagggctatttcttaaagaggcatgtaaatgtatttatttatctaatgtttttttccccatgtaaacttgatatacaaggtttagtatttgctcctctttcatattattttcacacgtatactcagatttggcatgtacctttcaacatctccataaaattaaacaccttttggagaaaagatccactattttctgctcaaaggtttcgcctacctaaagtggaacatgttaaaaatctatgtgaccatcactggacagctttctctcaaaactttccttcaacgccatggattagcaccagttttgtttactttaaggtacttttcccattcatcatctggttataataaatggatggaagaaatatttcccactgatggttggtctgttgcttgccaaatttttagggagagctgttcatcatacaacataagggataatgactcctgtcaggtaaaacagaagcccaagaaataacaactttttttcttaaaaagttagttacacttgttttcttggagaaaaaaacctgtcaactcctttgcttttccaaaatatttcagggtatttcctataaggttcataagaataagagcttaacacagaaatagttgctgttcataagtttattatctatatctgaaaaaatcatagaaaattgctgggtttagctctcagcagcccgctcctgagctctgaggaagcttgccttcttttgagctacccgatccttcttctgagcaagggacattttgggacggttccacctacaaaagataggaatatatattttttaaactataactgaagagaatagaatatttaatttaaaattttaataaaatttaattttgatagagaatatttaagactttgcaatcagaaggttaaataatccaagttcaaatacatttacttatgtatgatcttaagctaactttcccaaaccccaacttctgtgatgtcctactaccatagggccaaaagtcaaatagaagacatgttagattcagtaataccacttctaggtatttgcccaaatgttttgaaatcagtttgtccaagagagtggcactcccatgttcattgcagcactatatattaatagcaacagataaatggataaaggaaatgtggtatacatatacataatggattattacccagtctttaaaaatgatggaaattctgtcatttgcaacatgaatgaagtggagaatattgtgctcagtgaaataagccaggcacaaaaagacaaatacttcatattcatatagaatctaaaacaatggaactcacagaagcagagagcagaatggtggttacagaggctggtgggtgcaaagaatgggcagatgatagtcaagtataaaatctccaacaggaggagtatgattttgtttttagttctattgcacagcatgatgaatatagaatatcgtacatttcacaattaagagaataaatttcaaatgttgttgccacaaagtgttaagtatttgaggtgaatatgttaaatacattgatttaattactatacattgtatttgtgggccatcacatcactttatgcttacatgttcattaagtattactttctattccatttaaagatcaaaacatgaaagatcaacaaaaagcaacttgtcagccaataaaaaaatgcagtaaccagtacttagactgtactaggatagaaagaaccacctcagtagtgtctgaggctaacacatttccatcaccacagttacttttgcaaacctggttcccttcgcttctgccacatcacgcagagctagtgatcgagtttgcacaattacaccaacagtctgccccacgtgggaaccattcccaacctgttttcttgaaaagacaaaaaaaaagacgacatacctcttctttttaacttctttcttgggcttcttttcatagactggattctctcgtatagcagcatgagctttcttatacatctcctccatctgaaacaaaggaaagcaaacagtacttggtttcatttcatgtgccctactatattaatgcaaccataacttatcttgtccttctaagccagattctcaaaaggaactaaactaaatcaatgttggtaaacactttaacttctaaatgtaactcaccttttcctaacaaattcccaattttcaccttatgcaatgtgaattatcactacagaactccatcttactcaagaaaaaaatcaggccaggtgtggtggttcatgcctgtaatctcaagcactttgggagtctgaagtgggaggatcacttcagcccaggagtttgagaccagctaaggcaacacagtgagacctgtctccataaaaaaactaattagccaggtggcaattattaatggtggcatgcacctgtagtcccagctacaggactacacgtgagtccaggaggtcaaggctgcagtggcacaatcacagctcactggaccccagcctagatgacagaatgagacctcatctctaccaaaaattaaaaaaaaaaaaaaaaaattagcagggcatggtggtgcacacctataaccccagctacctcgagaggctgaggtgggagaattgcttgagcccagaagtctgaagttgcaatgagctataattgtgccattgcaccccagcccaggaaacagaacaagatcctgcctcaaaaaaaaaaagtaagaaaacaaaaagaaaaatctgcatgtacttctgagaaattcagccacacttcttgagtcactctaaatcaaatttttgtctgcagaaacaaatattgcgcttctcattttaaatactgtctgacctagattctttcattcaagaacaagtgccaaaagtattaagatattaagatgatgaacgtatgggaccaagagtcacaacactgacatagcttaactgagaccaaggactggacacaggccaacaagcaaattcatctgtcatcccacaatccctagacttttgttttccatctttatctcacaggcctttaaaagtaattcccagcattatgtaccaaggacctctcttctgtctttcactaccaccaatctatccctagtatctagtggtaatataaggcctctagaccagaaagatgtcagaagttttcctgaaaagccaaccgatcagatattttattgggcaattttttgttttttgacatgaagtctcgctctgttgcccaggctggagtgcagtagcgcgatcccagctcagtgcaacctccacctccagggttcaagcaattcttctgcctcagcctcccgagtcgctgggattacaggagtgagccaccatgcccagctaatttttgtatttttagcagagacagggtttcaccatattggccaggctggtctcgaactcctgacatcaggtgatctgcccaccacggcctcccaagtccggggattacaggcgtgagccaccatgccccgccagggcaattttgttctaaaactcactgaaaaaaaaaaaaaaaaaaagctgcaactctctgaatatctaataattatagcccactacagactatgtcacagtaatccaggtctctaaaattattcaatcaatgtggagatgtgattactacatgcatttgcataaagattattaaaggaaaataatgcaaaaatgctcactgcatttgaaacctcaactacctatacccattttgaaagttaatttccctacctcttttagcactctattatagctagctgttcactaacaaataacaaatccatttgatgacttcatatatagtcattcaacaaatctaagcaacccagttccttccaagacgtcagacaagcagacatgtagataatgcctgaattgaggtaaagaccacctcctgttggagacacatcagatgtctgcacaggatttcagcaggcacacaggaggatagaggccactgtagataaaattaatgagccagctagaaaaatacattagccaaaaagtagtctagctgaaggaaggcacatatacaggaaagcattaggaagtaaacatctgaaagcacaaactgggagtctgaaaagttctgagcaagtatgacatgactacataaagatataggttaggaagtaaattttgcaagactagtagaatcataatccaaaagtaaatgacctctttaccaggatgaagtcataagtaacaaagaaatataacgcagtaaaaattaacatgcacctacattactgataaaaaactactccttttcctaactcagaaactcaagctatttgtttattcagcctttacactgtgtccaaagcatagaaataacagaaagtggtcatttcccaactactgtttttaaaaattttcctaaccaatagctatgccaaaatagaagctactacacactaacgaaaaagaacctgggtcaggaatggctctcatctgtaagcccagcactttgggactcattcttgcaaacatggctcccctcatttctacaacatcacgcagacccagtgatcaaatctcttttcctgtgtacatgtctgagataatgggaaagtccagaatatagcacacatatgctatgaagagctttcctcccagatggtatcaaaataagtgaagtttattatctagcacctcttatccaacaaagcagattacaactatgattacagaaatgacatctacaaatacagaacagccaaagcataaaaggtagccaaatcttcagatgcttgaagtctcccacacttgagcatctaaaagattactaaaagaatgttgacaagtctagctcatgttgtcaagaaacacacctatataagaatgttacctgcccccaaaacaagtaataaacctatttccataaattaaccaatataggcatttttaggtaaatgttttaccatgtctggagttacgctgttctttatgtattgagagaactgtttcttgtaagcatcttcatcttcttccattaagtagcgcatgtaatctgcaacattctggcccatgatgtgcttccgatgtacttctgcattaaattccttgctttcagaatcataaccagggaatcgtttggtactaaaataaagttattcatattttagtatagactcacttaacttagtttactagtaagaatttactttagtagctgccatcagtcccgtcttgaaacaattatcgcatcatatgcaaccaaaggaccaactactgactgctcagttagtgggatatcatcattcagcagctcatctctgaattccaggacagaaaagaaattcatgctacaaaaacctttaaaagccattaccaaggctttccaccactacaaaattagtcatccagcacatcagcacaggaaggagtttcaaaacttatactctaaatcctttaattttcagtgggtacatgggaataagtgatttgtccaagatcacagttaatgaaattgtcaagtgagaatgctcttggtgtacttgcaactaactccccccacccacctccacatcataaaagcaaaatttcagttgggttgtattttaggcttaccaaaaattactatttcttggttaaatcaccaaatgctaaaatattcctaagaagttaataaatcaagatgcacagactcaacaacaaaaaatatcattaaaccaatggaactacaaattaacctacttaacttcccaaaatggcctacaatcttattcctagttgcaggtttagaaatctttcataagccttttcctcaaacttcttataaaattctaggatccacctttttgcataattcagtaaatcatttttattctgattgaaaaaagaaagtgcatggggaaagaggatggagttgctcatttctaataagaattaagtcatatgcaaaaggtagtggtttcaatcccatctctttcaataactggcccgaaaaacttgggacaaataactctgggcctcagactcttaatttataaaatgggctataattccttcctgccctactaggttcctcctgcatggtacctaggcatacagcaggcattcaattgatagctactttaattcggttatctccacagtccaactagttaaaaacagggaagtaccacggtccaggcaccaaggtcttaaatagtattcttacctgtgagggatagacaagcctccatccacagctcccttcagggcaccaaaaactttattgccagtggtagttctggcaaggcctgcatccaaatagcaggtgaaggcacctggctgaccatcaatgctttccacattgtattcatcaccagtcacctccacttggccttcatagatcttgtccatgccaaacctattgagaagctattcaagaaaccaatgtaaatgctggtttcaattattcaaactgctctaaaattaaaatagcttatgtcataaccgtaaggaccactgacatctggaaaagaaaatttccttccacacccaccctttcaccagatccacttgctcatgaatttttaaatgctatttaaaaaaaaaacttaaaacattcaatttcacttgaaacaattttgttttatgacttttgcatctttgctacatgtccacacttgacttatgcagcaatcaatgagaatgcataaacttgattcttatacttacaatgttccctccattaaaacatgtttataaccaatgagtgggttgtcatcaaccttgctgcacatgcttaacaattccattgcaaaacaaggtaaaaaactcagataataaaaacaaggcaaaatcccatcttcatctaccaggaaaaatgtttaaaacaaaaatgaatcttcccgtcaatggccactctccaaaacactaagattctcattttttttttttttttttttgagacacagtttcgctcttgttgcccaggctggagtgcaatggcgtgatctcagctcactgcaacctctgccttctgggttcaagtgattctcctgcctcagcctcccaagtagttgggactacagacacacaccatcatgcctggctttttttttttttctacttttttagtagagacagggcttcaccatgctggccaggctagtctcaaactcctgacctcaagtgatccaccctcctcggcctcccaaagtgctgggattataagtgtgagccaccgcgcctagccaagattctccagttttaatgtgcatataaatcacttggtacatactatcaaaatacagattccagaaggtctagagtggagttcccacgagtctgcatttttaatgtttgccaacattcagaatgtatacctaagtagcaagggtcttcattgtccaattaagtagacactagctacaagtggattttcaaattcaagtttacatactgctggaactcaacagctgcaggtcgctagtggcaaaaccactggacagcaaattacagatttgtgtcattgcagaaaattttattggaaagagctgacctagatagatccattaacaaagcagaaaactggaagcaagcactctcctgaagcacaacttaagctatcttatccatgtacaaacatcttgcagaaaactctccaagcaatcagccacaaactacatcaattaaaatcatcttgtacataccctgcgggccagcagcaggccagtacaatatgctgcagcataatttgtcaggccaaccttcacaccatattttggcagttcgtgtgcatacgctgcgcagactatcatatccccctctatacgggcataagcaatctatagtaagagagaaactaggttagtaatctgttgctttcactgtcttactacatcttaattatttttcaagggaataaaaaaacattgatggacacagatgaacatcacttaaaatgcttaagactcttagctgggttaccagtaaattagaggtgcttaaaaagtcaaagaggaatacccaaatatttcaatcatcttttgaactaaacataactaaagtcagcaaagtctcaggaacctaacgtttagttatctgaacttgggtacggaggaagacaatgccttcacaatcaacaaactatttgcccaggaaacaggtgtgcctacctgctgcaaaatatcaataaatcttaactctcagaatttctcctagttgtaaaagcccaggattctagctttcagagtccagtgagaatgctcttagtacaagagcaaaactgacacttcctaaaggtctttcatgcgggagccacctttgtacattttattaaaacctatttcaaagaataagcagaacaatcttaaagccctgtttaattcacaactaccttttcagtggttaagtggcatataaggccatataggaaaaatcaggacaaaccctattcttctactggaattgggatgggcaagaacttcttacttacttctaatctccccaccccacacacataaactaggtttcagtgtcttgctctgtcacctaggttggagggctgggtgtgatctcacttcactgcagcctcaacctcggggctcaaacaatcctcccactgagtagctgggactacaggtgcgccccgccatgcccagctaattttcttacattttttgtgaagacaaactctcactatattgcccaggctggtctcaaactcctgggctcaagcaatcttcccgaagtgctgggattacaggcatgagcgcaaccaagagcattttttaaagtaccaagttcccaggttccaattctagacctactaaaaggaaaaattattcactggatgcttttggaggtgctagacagcccttctaacacacacaccatgtgctttgcttcccaagcacaatttctctagcaataaaaaaaggggactgtctagaatacaacttacctgacaaatgatatctctgtttgtcacacgaactatcatcctgtatttgggtgtgttgtatttatttttatcttgtatcaccaagcgtttccgagcataataatcagttttaccctctgaaagaaaaaaataattgtagaaaggatactccactgcatctgcaaagcagattaatattgtaaacacaaaaaggtgacagtacctcgtcgtcttctaaatttcacttggtatctcttaaagtaggccttattcttaacaactttaacaaaccccttaaagaaaaaagaatgttattaaaactttgatgtcttagcctatgatacttttgacataaattaaccatgtaacaaagtaacacttgaacttcaagagtaaacagacaactgtcacttgtagaatcccaggtttcacaagcaactagggtcaagaatctttttcctctaccttccatgtcacagactagtagtttcataaaacaataaaaatgaatccttagagaaatatggaataaaagaaacatacaaaatgcaggccccaatttattacatttaacaggtataaaattattgttatattgctttcaaaaggttttaaacgctttcaatttccatatttgtttcttcaaggaccagcaccggtaattgtgccaaacttttgcgaagcactgctccagacagcaatcagtgatgccaaacgtcggtttgttcggaacacgctatgtcccacttcgaaaacctagcctcaaataacaactacgtacctctctcgcttcccatgttatgtttttcaaaagcctaaattacctgccacaaagcttaactgggcaagagcacattcagcagtaattcccccactaaaacagcactgttccccatcagctaaagcaacatttcatcccacccttggggccctaccccaataattaaaaactcatccggcgacggactctagaggaagaggcaggaggcacgtattccatgttaaaggagcttccggggcccagggacccctcggcctccaagctccactgacaattttggcttaaaagccacttgctcagcccacgggcacaagcttcctaaatctaagacttgccggctccgacattctcctggaaaacccacgaagtactcggtactcggaggtcgagtgggacccgaggacctgcagcccccctccattctggcgttccccagctaggctgaggtcgactgcttgcgacctctcacgcccggccgcttgccagcgccccctcacactagacggcagtatccgcactcaggctgtctactaaactcacccttctccccaatccgccgtccaagctcacgcaacccttcttcgccaacccctccccccaagttcgcgcaccgggcggcagccatttaaggccacgctgggaactgcacctcgaccaagtcagagctagcaatctaacgccatccggcccctgcgacgcgcgagacgggccctaggctggcatacgggcaagaaaagggaacctccatgcatctaaagccccgagaccgaggcatccactcaccatcctgcggaacagagaccggcgtccgctgctcgacagagacctgcaggcccagcggcgctagggggtgggaaaagggccacagcccttgcgcaggcgcagtatgtagcgcggacggtcacgccagtgacgtgtgaaagagagagggcgtcggccacaaggcgttttacgttccgccccc

SEQ ID NO: 895 - DNA, 2803 bp, Homo sapiens
  misc_feature (1)...(2803): n = A, C, G or T/U
nngggagcccggccgccagcgctcgggtccgcctctgcctgcagcgcggcggggcgatgtgtgattaccatggcgaggagtctctgtccgggggcctggctaaggaaaccctattacctccaggctcgcttctcatatgtgcggatgaaatatcttttcttttcctggttagtggtttttgttggaagctggattatatatgtgcagtattctacctatacagaattatgcagaggaaaggactgtaagaaaataatatgtgacaagtacaagactggagttattgatgggcctgcatgtaacagcctttgtgttacagaaactctttactttggaaaatgtttatccaccaagcccaacaatcagatgtatttagggatttgggataatctaccaggtgttgtgaaatgtcaaatggaacaagcgcttcatcttgattttggaactgaattggaaccaagaaaagaaatagtgctatttgataagccaactagaggaactactgtacaaaaatttaaagaaatggtctatagtctctttaaggcaaaattgggtgaccaaggaaacctctctgaactggttaatctcatcttgacggtggctgatggagacaaagatggccaggtttccttgggagaagcaaagtcggcatgggcacttcttcaactgaatgaatttcttctcatggtgatacttcaagataaagaacatacccccaaattaatgggattctgtggtgacctctatgtgatggaaagtgttgaatatacctctctttatggaataagccttccttgggtcattgaactttttattccatctgggttcagaagaagcatggatcagctgttcacaccatcatggccaagaaaggccaaaatagccataggacttctagaatttgtggaagatgttttccatggcccctacggaaatttcctcatgtgcgatactagtgccaaaaacctaggatataatgataagtatgatttgaaaatggtggatatgagaaaaattgtgccagagacaaacctgaaagaacttattaaggatcgtcactgtgagtctgatttggactgtgtctatggcacagattgtagaactagctgtgatcagagtacaatgaagtgtacttcagaagtgatacaaccaaacttggcaaaagcttgtcagttactcaaagactacctactgcgtggtgctccaagtgaaattcgtgaagaattagaaaagcagctttattcttgtattgctctcaaagtcacagcaaatcaaatggaaatggaacattctttgatactaaataacctaaaaacattattgtggaagaaaatttcctacactaatgactcttagttcatttggacataattaccattttaagaaacctgccacttttaaagaacaattttgagcattaaaaaaaaatggcttcaaattcctgccagttacacaaaactccttccccccaggcctgagaagccatcagtatgtgattactgaagtaatggcaggtgtaggatcaacaggtccccaagatgtcattcctgcccttttagaagccctgttacatctccgaagtacattcattgtgtaactattttgactgactttaaaaaccaatgctgtgaaaagcttcattccataaacatcaacagtgagtgatttgtagatttaccttagccaaaataccaatgctggaagcattgtgtttgcattgaagctgctgttcaacaagaaaatttataaatttactaatgtcttagcatggtaaagtttgcacattaacagaaattaagactgcaaagcaggttaaacttgcttctttataaaacagatgttgggttaatagcatggtttactgtattaaagacttatacacccatttttaacctcattcagacatcaagttatgtgtagcttcacaatggttcaagtggcttacttcaagaaatcttatacttgacagtacaccaattttattgactaaaaatggatgaactttcctaaagattcaaagggcccatcttagtatcacgcagctgactgagcccttcaaaactgacatcttaaggcccaatcaagatccacatatcctgattttgaactatgtgaaagtgggactgtaagtgcaagactaaaataaattatagcagactttttagtaataactttccattttcaaacagtatatcctgtgggccaaagggctatttcttaaagaggcatgtaaatgtatttatttatctaatgtttttttccccatgtaaacttgatatacaaggtttagtatttgctcctctttcatattattttcacacgtatactcagatttggcatgtacctttcaacatctccataaaattaaacaccttttggagaaaagatccactattttctgctcaaaggtttcgcctacctaaagtggaacatgttaaaaatctatgtgaccatcactggacagctttctctcaaaactttccttcaacgccatggattagcaccagttttgtttactttaaggtacttttcccattcatcatctggttataataaatggatggaagaaatatttcccactgatggttggtctgttgcttgccaaatttttagggagagctgttcatcatacaacataagggataatgactcctgtcaggtaaaacagaagcccaagaaataacaactttttttcttaaaaagttagttacacttgttttcttggagaaaaaaacctgtcaactcctttgcttttccaaaatatttcagggtatttcctataaggttcataagaataagagct

SEQ ID NO: 896 - protein, 426 aa, Homo sapiens
MARSLCPGAWLRKPYYLQARFSYVRMKYLFFSWLVVFVGSWIIYVQYSTYTELCRGKDCKKIICDKYKTGVIDGPACNSLCVTETLYFGKCLSTKPNNQMYLGIWDNLPGVVKCQMEQALHLDFGTELEPRKEIVLFDKPTRGTTVQKFKEMVYSLFKAKLGDQGNLSELVNLILTVADGDKDGQVSLGEAKSAWALLQLNEFLLMVILQDKEHTPKLMGFCGDLYVMESVEYTSLYGISLPWVIELFIPSGFRRSMDQLFTPSWPRKAKIAIGLLEFVEDVFHGPYGNFLMCDTSAKNLGYNDKYDLKMVDMRKIVPETNLKELIKDRHCESDLDCVYGTDCRTSCDQSTMKCTSEVIQPNLAKACQLLKDYLLRGAPSEIREELEKQKCIALKVTANQMEMEHSLILNNLKTLLWKKISYTNDS

SEQ ID NO: 897 - DNA, 65142 bp, Mus musculus
  misc_feature (1)...(65142): n = A, C, G or T/U
agagccttctagtagagttagtgatgtcaccacccagagtgatgtcgaggttccctgagttcacacaggcaatggctgagctgagacctgactgctaatacccatccctcttggctcccagggttctgccctcctctgtcctgtgagccacccctgccgccaggctgatgctgggttttgttttcatgtgttttgcctatatgggactgtgcagtatgcatgtccctcatgctcacagaagccaggagagggtatcagatcccttagaactggagctatagacagttgggagctgccacatgggtgctgggaatcgaaccaggtgctctagaggaacagcaagcccttaaccgccaagccattacgccagcatctgaccacttggtgtgcgttctttaattattttctttttttcctttttagtgctgcggaccagaagctgttcccactggacaatagcttcgtgagaacagacgactaagcaggggctcagagaaatggagtgactgtcccaaggtcaaatagccagtttgggttcagatcctactttgtcagactcgcagttgggtacacgttgctgtccatagtttttatgacccagcagcaatggagtagaaatgtttgcagggtggcagaatgccttctccattaaccgggcacagtacattttaaggcagtagaaagtatctctgaacaacagtgggtttagcacacagcttagcagagcccctcacagctggatcccaggcagagaggggcaagggagaggctctcctggagtactctgggtctgagctgtgagttgggactccccccgccccccagggactggccaggaagggactggcctatcgacaaggaggacagcaaaagggaccaatcaatgctatctctccaggccatgcctggccagacattgatttctagctctgctgttaactccctgtttatgtagcgcctgaactttgcacaacagaacatttaatgcacagagagggcccgttgccatgaaaaccaggctacgctgacagccgggacgcggccctatccctggtttattggcctgcgcagaatgtattttaaccttgataagtcaataactttttatactgaaggaaatctgccaggagggcttaggacccactggcctctcccggtcagaggggaggtgtagcagctggctttaatcccctggaaatctctctgccactcacaggcctggcctgcagacaccagcgcctagctggggggtcgggcagggaccaccctcacttccagcctctgtctggttactgaaagcctctagcaaagttggaaacacttattggataagagacccaggaaggctcaaattccagctccaccttcccatgaccttgagcaaggccaacgtcaccaaaatctacacccgtcacccagctagtgaatcttctccatgacttgtgttaggtttgcagatgaaacctgggggtggctggtcacagtgaccccaagagtctgtgattgtcattttcacatgtatgttataatggccctgttcctgttttctcattattgtcttgagatggccaaggctgcagccaatacccccagtttccagttgtgcaaattaaggcccagggaaattggctatctcatacaggaatctataagagggctgttcttataggcatatcaatgctaagccctgtgtgcttctaaactcagaaactttaacacaggaataacacacacacacacacacacacacacacacacacagctgccagttcctggactcagtagacatctctagccaaagacagcacagctctttacctcctgagcttgcctctgaattctcttcaagacagagctgtgttccaaatagaaccgtatgtccccaaagggctctatgttcaagttctattctgtcccgaatttgctgtgtgaccttgggcaagtgccttgccctctctgcaggtgatccacagtgatgtagtatgagaacatagggaacattgtggtctctgggattcccagagagttctcataactttgaggaacccaccatgaagcctgacttcccattctaactctgccctcttctcagagcccctgaaccttttccaactccagcaaatactgacctactgacccagaactgggaaagcagggtagctgggtgaggcaaacaataaacaaggccacctacaggggctctgacagatggctgatgggtagggagggcgacttctggtgagggagtatcttggcttctcttctgttgggattgacaaatgcaacctggtcccactccatctatcagaaaggagagagagagagagagagagagagagagagagagagagagagagagagaggcttgctggtgagagctctgcttgcttccacggtcttaacacaatcccagatcccctttctagggaatggtgacacccacagtgggcacctcttcctgtgtcccctaacacatccacaggccaacctgatatttcccatccctcatcaaaactcctctccctgttggttaggtcctaacaaggtgtactggctgtttttgtgtgtcaacctgatacaggctggagttatcacagagaaaggagcttcaggtgaggaaatgtctccatgagatccagccataaggcattttctcaattagtgatcaagagggaagggcccagcccattgtgggctggtggtcctgggttctatagaaagcaagctgagcaagccaggggaagcaagccagtaagtaacatccctccgtggcatctgcattagctcctgcttcctgacctgcttgagtcccagtcctgacttcttttagtgatgaacagcaatgtggaaatgtaagctgaataaaccctttcctccccaacttgcttcttggtcttgatgtttgtgcaggatagaaaccctgactaagacacaaggtgacatctaaaagtagacgaggcacggcaaggggtaggagacagatgtttgggctgggacctgagcttcactaagccagaggtgcaaagagcctgggggggggggcggggggggcggggataagctaaggcgcggtaggcaggcaggaagtagccggaggggtggacggtggactgtggtgggggagcaactaggaggtccatccctgaggcagcctgagctgcttcctcataaaggtccacagtttgcaggcgccctggtctctgccccatcccttttgcctgcccatcccccgcccccgggctccacgtcctggggggcggggcaggtgagtgacaaggttaccagggttctctccctccccttttctcccggagaagcataaagagctctttctttttctgcttattaatagctctgattaaattatctctgaaaaacctacatggtgtgcaccaatgggggctcggctccctcccggctctggcctagattagagcaaccagggcaggtgaggcgactggggggggggtgtgggggggaggttgaggctgactgttcccctgccagaatctgggctcagctctgccagctcagttcctgctcagcctctgactcactgggcccttcggagctccccatggggtctttgcattggccttgtcacccaccacccacccccgccagggtcccctcaccttttcccttggctatttattgctcctgcccattgcactcgggcgcccagtagggtgcctcttgcatcacctgccccacaccggaggcagcacctgctccaggcactcctatagtaaccttgtatcaaccctgttcactcccttcttgggatcacaggaaagctgcattccttagggctcagtagagactgtcactggggaaactcccagactatgctgaatttgctgaggagcctcaagcaatggaaagggacaaccaggcccagtactgagagcagaactaacctcacacatcataaatctccccccacccccacccccagggtttctctgtatagccctggctgtcctggaactcactctgtagaccaggctggcctcgaattcagaaatctgcctgcctctgtatcccaagtgctgggattaaaggcatgcacacaccatgaatcttgtctcacagagtggggggaaaccgaggcacaaagaaactggatcacgtggaggtacacccccatcagtctctttccactctctccctcttcatatctatcctgtaccagaaaacagagtcccctttaattccagcagttacaggtgggcaagggtagaaagacaggcagatccttgtgagtttgaggccagcctggtctacatcaagagttgcaggcttgccagaatacacagtgagaccttgtctggaaaaaaaagaaaaaagctcacacttatatccttgcactcagaggaaggagttagaaggtttgccttaaggtcagcctgggctatatagcaaaaactatttgcaaggaaaaaaaaaaggggggctggtgagatggctcagtgggtaagagcacccgactgctcttccgaaggtccagagttcaaatcccagcaaccacatggtggctcacaaccatccgtaacaagatctgactccctcttctggagtgtctgaagacagctacagtgtatttacatataataataaataaatctttaaaaaaaaaaaaaaagaaagaaatctgagtcacctcattcattgatgatggaatcaacagatctttcttgagtggcaactgtttgtaacctgtgctaaagagtcctggggagcctcaagcttaggaaaacagacaaatcagactagacacagcaggaaggcttcccagagaaggaggctcactacttgcaatctgaaggagaagcagtgtggggctgtgggcgtgggggaaagaggggagtgggagagaacccacgtcccgccagagttcctgtgctctgggcaggcggacgctggaggactgccggacgctttccatgcggccccgggtgggcatctggctgtttgaagccactgaccccacatggcaggtggtggacaaagggcagcccctggtaccaggttctcagcctccagcatcccactctggatacagcagaggagctgagaacagaataggggccacggggcggcacttggccccggggatgaagcgggaagagggctggggagagggggcgctggatggttcccacgcgggctagatcccttggtcaggtctgtggttggagcacaggaagaccttctggctggaggttagacatggctcgcagcacgttaggagaaagcctatcccatcgttcaagcacggcgggccttcatgatcaaagacagtctatggttttagagctttattgtagaaaggcagggagaaaagagagaaggtagtaagagatagagactggccatggccacatggagagaggggggaagggaaagagagaaagagggctagagccaggcgtggtggcacacgcctttgatcccagcactcaggacgcagaggcaggcagatttctgagttcaaggccagcctggtctacaaagtaagttccaggacagccagggctatgcagagaaaccctttctcgaaaaaccaaaaaaaaaaaaaaaaaaaaaaaaaaaaaaaaaaaaaaaaaagaaagaaagaaagaggggctagagagtaagaaaaaacgaggactaaaaagtggcgaagaggggccaagcagtccctcttatagagtgggttgggctatcttgctgttgccaggtaggtaactatggggaggagcatacctggctatagtcaagtaactgtgggggtgcagtctagccagaatgccagaagcttgggacattgtctgtgtgacagagtcacagaattatggacaggcacctgattctgggaatgtggctcacttttccatcccttgtagatttctctattgggtcactggagcaagccccattcaaccaaaataggctgcctatcacaagcccacagagcaagagttggctacctggagagaggaccctctaggtaaagagaacagcactgtgcaaaaggtctggggtggtaagaggcacacatgatggagggtgtacatgcatttcagcaaggttggtatgtagggtcttataggaatggcgagggaataaactaaatcctagtcccaagtgttcaggagctggccggcctggaggtccccaaggcttcggcaaaggaattatagcctagtctctaatcagatcatgttagtgttggacagagtgtagaacaaaaaccaggactatgagggagggtggctgtgtgtggtggaaacttgtgggttcttggaaaagtcggttggatggtgttttgctggagcaaacacgtgaaggaacatttccttaaagtggacacaggtgtaaaaggctaaggcagactcttgaaggaacgtttcactgaagcagacacaggagagaggatgttctgctagagcaagcacgtgaaaggacctgtggtgaaggattctttgctaatgaccacacgtatcagtctgccttatactgcatagttgagctgcatttgtcgggactccatagagagaaacgcaccaaaaaccttctggtggtgtgctgcagtttcttgccgctcccgaggatcagggctgaagcaagatactggagggacacatgatgtttggagggtataaataggactcaggaacagctggctgtgtaacactcgttggtctcctgtcttcgctgatcttcgctttcctgagagaggcacagtcaagaacttttgctggtgagtgttcctgctgactcagcaaaagctgaggcctggctgtctctgctaggtctactaacccaactctactgaactggcctgcccctgtatgcatgaagtgtctctgcgagtggatcgagctggcagtgcctgctgacctgtgaactgaactgctggtttccagacaacacagatgggagttgctccaaagaacctttctgaacatgtacacttcccccgtatcctttcttttctactatctcaggtgggtggtgggctataagggaggttaagacatttaagaaccgtcattaaaaataaggattgaggggctggtgagatggctctgcaggtgagagcactgactgcttttccgaaggtcctgagttcaaatcccagcaatcacacggtggctcacaaccatctgtaatgggatctgatgccctcatctggtgcatctgaagacagctacagtgtacttatgtataatagtaaatctttaaaaaaaaaaaaaggtttgaaatgattaaagatacaaatgtgtatttggagacataaataaaataaagtctcaagcatctccggaaccttcaactgcttgcaaaacacatctctaacacagctgcctctgagcccactgccccccagaatccatcatcagcacctcacaaactccctgacctttagagacagacacccccttcagatctcacccttagctgctgccctcccccacccccgcccgcactgtttgggaatcacgccaggtttttgggaagctattgaccacattgggagccctcaacaaggagatggacccagaaaagggaagaaatgtctgtccaggtcacacattgtcaatctgtggctgcctgctgaggggtggaggactgggagggcttcagttccttcattgggtgaccttgggcaagtcccgcagccctcttcccatacaagatgcgggtagtaattctatccgcagggcacaggttctccgtgaaggtaaaaggactctgaaacatgaataacacaaggcggctgtcatggtgacctaccaacagcgaatctcgggctcagagaaggctgtactcagcttggcccgctgttcaccttaacgccacccctcacccccactcctctcttttcctagatttcggtcgtcattgtctcctcctctgtcccaggcttgaatctgctctccccacctgtccttgccctgggtcctgccagcaactcgcctgggcaactcgccctgacgtcagggccgctctggccgctggcccagaggggaagcagctggcagccgatccggtttccaggtaaatccccgcccccacccacactccgggagcagggaggggccaaggaggaaggatggacaggcagccactgggaactacagccaagtgcagaggcaggctggggctgctggaacctcattcacagtgctgatctgagacccgaaacagggccagcttctgccccagataaggagtgtgtggcctacttgggcctgccctggaggtcccttgccagtgcctcttccaggttctagttagcggttgttctgctctctgctcggctcctgaaagtaggctaaggcctgattgcaatccacacaaaaccctggatgcgctcaccagccctctaggatggaggaccaccactaaacacttgctgagtgcatctggtgctctctcttgccccccccccccacaacggccagatacagaggagattaagatatgtcttctcattttacagacaccaagccttgaagataaacggccaaggtcaaccgcaggcaaggttctgggaggacgccaggcatcactaagataaagcctgagatcactaagcatccctaagataaagcccctaaaggggctggatgggggtgtcttggaggctggatgggggtgtctgattgatgttttacgtttctgcagggatcctgaagttctgtctggaaagctgggtgttcaacttcttttgtggcatacattttttttaattcagtttttcaagacagggtttctctgtgtagccctggctgtcctggaactcactctgtagaccaggctggcctcgaactcagaaatccacctgcctctacctcccaagtgctgggattcaaggcatgtgacactactgcccagtcttgtgacagacattttaacagtttaggaatctgtgtctcccagggttcagtttccctgtctgctacctgtgggctgtcaggcaagtaagaatggaaacacctacttagttttaggtgatactgtgcctcagtttccctacctgttaaatggacgacaaaccggagccttaccaggtatggtggcttgtggtcatattttctgcactctggaggctgaggcaggaggatggcttgaagctaggagtttgagaccaacaggagcaacatagaaaatactaagtgcctgactcccgcggtcaatgtatacatctgtgggatggagctgaccaaggattcagcatgtggtttgtgttccacagatctcagcgctgatgcccaaaactccaccaccatccccagtcgctccgtggaaaaggcaatcgggaagcttcacgtcttagttttgtccgtaaactgagaacaagtgtcaaatatcagtgttctcctctgtaaaatgtaggccataaagccaatctcacagttttgaaaaatttaagtgtagtatgcactttgctctgtgtgtgtgtgtgtttaggttgtcccaaggtttgatgttgggtcttgcaaaccgcaccctttaccatttggtgtcaccccaacctatttttactatctttaacacactcctcatagggcctgttccaagagtaaacggaataatgcatagtacctaccctcaaacaggtactcagtgaataggattacctgctttcaaccctttaggtcttcgacaaagggactacaacaaccagcatgccttgcccttccaatcgggactccttcgcctgttttaggctcgcagcaagccgggagttgtagtcctctaggagcaggacccgcctcatccccgcttggggaaaaaggttggagagccgccctgccggcctttgaattttgccgcgaaaagcgcgcgtggcggcccccagccccgcctcgcggaggacgcggcgccgcgtcaccgtggtaaccgcctctcggctgcagctgattgggccgtaacgcggggggcggaccgggggtgagacgcagcggcaggagcgggcgcccgcgcctgtcagtcgtgccggagcggagcagcgggcagcattgccgggccggcagctctgcgaagaggctgcgcgcgccggccaggccgggcgaagagccgggcccgaggctaggtgagggtgctgggcagcgcgaggttgcggctccgggagccccgcgaaccgtcccgggccacgggcacgggagagacctgtgcgccgaccgctgctgcggcgctcgagcaccataccgggtgcacggctctccatccccgagtctgccctgcgcctgctggatctgctggtcctcagcgccaaggcccgcgaggctacatcccagtctctgccgctcgctgcggctgccactgccgctgctcgccggcttcccctccccccacacccggagctcggagcaggaggaggaggggccggctcgttctcggcgctgctctctgcaacctgcgggggccggtgcacgccgggcgaggagcccgggccgctgcaggtgcgtgcaaccctccgaggagacggactctccacctctgagcaaagccgggagctgcaagccgagggcgggagggcaagcgagaggaagcaacaaagacaggctgcagctggggctggcgagaggggccgcggccgccggcctcccagcgcggacggagagggcgccctgggagaggcgcgggcagagctgcagcggtgagccgggccccgaagggaggcgcagcgcctcccgccggacgtatggagcacagtctcctgcgaggatgcgccgcctgagcgcgcgagcggccggggtcccaggcggacgcgacgggtactgagaggggggaaaaaaaaacctttttccgacttcggacggcgcttccggacgcagggatcgccctcaccgacggctcccctttccatacgaagaaagacatcggccccctaagggggcctttctccagcaatctttatcacccctgcatggccgcaacccgcagatcggagcgtcgtggcctctgagatttggtgcccttcgtccgactgcctgatacggtgagttgcggggtgcagaattttgggtttgagctggggacagctcctcgcaacctggcaacctggactggccctaaaagggccctaggttgttgggtgcccagagacagcaatgctacttgtccacccttgtcctgcccacacaacttatttggactggctggagtggagattgtggaccctcgtgggtattctactgacatcggtatttgtcagaggaaaggcaccccacccatgaagctaacaaaggtggtggccctgtcctctggagattcttagggaatcttgtacttttgtaaagattgattgggggcagccagggttggccagcatggagggggtctacaaaaccacctttgggatcttaaagagacagagctcagagacagggagtcccaaaacttcatgtctgaggatggtgtctttccaggcaagacatttgtgtgtctattgttacaaataactcacaaagacagcatgttccaatgggctgcatgtgacatcactgcccgacctttgatgtcaccagaattgtgacaacacagctggctttgagtggagccagaatggccaaggccgaatgccttggtgtagtagaaggtgaaggccaactccctgtcctccccggccgcaatcttatgacctaaatccccactcgaggtgggggagggaggcaggcagtgccagctgtccctgcccctgaggacaggtgttcagaactctgcctatgtctcctgcagtgtctggagtctcccagactcccaaacagagcaacctcttacttttaagcaggatgcttaaaaggaggtccccatgaaccctaccatgtacccagccagcaactggagttcccagggtccccagaaaaatgtgggcttcagccttcaaacaggcttctcttgaaaaggtgaatgtcctgcctgagccagagagagaggggagccaggaccttcctggtgtgtgtgtgtgtctgtctgtctgtctgtctgtctgtctgtgtaagttcagggaactcccctgctcttcaaggtaaggggccatggtccagctgggactcctgccttagctgttccccttctgtcatttaagatgactttgacaagcagtgtaatagatgctcattaagcaaataccaggccaggggggataggtggagatgctgagagccctcctctccccaccgaactctggcagcagccctgtacagtatggagcccagagagctcccaagccacagcctgcttactctcatttgcccatcccagcaatcactgccagggccagatagggggtaaaatagccacagtcaagtttctaggggaaagattgaagacgctggcattgttgctcccatggggggggggggcggggacgacaggtgagacagggtttctctacagaccatttttacagcctcctcccaggctcttccattaacaggtcaataaataccggggtgggggggggaggccactttggaggtttggtggggtgatcctgtttccagctgaagggtttctttacacgcaagcttccaaggacagccagcggcacaacagcagattgggggtggagtggagaggggaggctgtgggcacagggctgtttgcccggcctctctcaacacttcccagcttagaaacaaacttggagtgtgcgccagagatacacacacacacacacacacacacacacacacacacacacaaacacgcggttggaggccctctgtggagtatttacagtccctcagccaaggcagagggaaaggctgtcagagttgggcaactccttctgttcctttccctctgctccctgggcttggcagtgagcgccagacgaggggggggggggcggtgtgtgtggggagttgccagcttacccggcgtcttccagagcgccaggcattttgcggcatctcagctgcttctcaggagtggattgtgctgtgacccattttgtggatgagaaacccaaggctcaagtcaaagaagtgatgatgcgcagccaggcagctccagtgggttggcctcggtgctccccccaccccattcagaatctccaggacttgggcataggggaggcacccctgtcctaggacggtttcctgggtgaactgaacacagtggtaacttctgccaggccttgtgagtccagcctgttcccttatacctgctaggctcctatctgtagccctggggggtgggggggttatatagcatgaaacccacctgccagagatagtgaaaaagccagccttcttcatgtgagatggccctgggctactcagagcccctggcaggctctcctggtggaagacaggtttatagatggtaacagaactttaatgggtggcgatcctgacccagaggcaggtgggggtgggggggtggggcggggcggatagaagagcaacacaccggatgagtagttcagagctgtctgagggttgaatggggcagggtggcactgaggtgtttgttctgtgtcctggggtctcatgtgacagggcaggtgtatgaaccattcctgcagcatattcctaagccccgccccctcccaatgctcccatcactggcacttaaccagtgccccgaccagttgctctaaaccaggtataggccctgtccagcttgatgcctttggtgagaaacttgaagctccccttccccgggggtgggggtgggggcaggcttattgccgagactggaatggttgggtctgggaccgactgctgtgtgatcgcattgcttggctttgagtctgagcctcggtttccttatctgtcagaaggagctacaagcaggggcgtggtgaggattctgtgagggcttagcacaggccagagcctacagtaagtgttccataaatgtagtttctacctgctattagcataatcctcagctctcccagtgtctcagagcccaatgctgaagaccgggtttctaggctagggtagggtccccagccttccagcgcctctgcaagggggctcccacgtggtgagcctacagggggagcacacgtggctcccatctgagtaccaggggccgggcctgaccagggcgtcctccccaacctccctcctgcccactcttgctttgccaaccctcccagtcagagaaagcaggcaagcagctcgtattcatgaaccgtaattcaatcaggcagcgattccttggggctgggcgggggcgagaacgagaaggcgcgcacaaaagggccgctttattacctcccgcgggccgggaattgctgctctcccccagcaccggccggagccgcctttattgtgttaacccatttgcgtgtcaagagctattgtgcgctttctcgccgccggtgcggtgcggctgagggaggagggctgcgctgccggccggtcacctccgcgggcgccgcccgccgccctgattggttgctaagcgatttgcatccaaggtaatcacttttatctcagaaggatgtcgactataattataagctactgacatcttttgaaatctgcctaatgactattttagtctgcccgggctgggggtggggagggggattctgcgaagggatggaggctgtcgggggtgtgtgggcattccttccacctggaccactgattgcttagttgagaaacagctgagtgcctgctgccagcctcagacaaaaggcaaacctagactgtggctggtggggcgcccctattcacccgtggtggacttagtgccatttcagagatggggaaatagaggcctcagaaggagccagatgaccaatagataactcaatccctctaacttgtttcacttgggggggggggcacaggatatgtttatgccccgtggtcacacagcctgggagtggaagggggagggcagtggatccccatagtcagggttgggggtgggggacacgggtagtgggaagagtataactgggttaaaattcttctgccctatctcttgtgcccttgggtaaacccttcacctcggccttgacaatggggtgctggccttgaagattgtgataccctcagagcaaatctgcaggcagtgggaaccctggattggacagaaactggctggagggaaccccaagagtggaagactgtagttgttcagggagggcctcgggagggaccaagaatctgcccggcccagcatgcaggagggagtctcaggcagagggagaaagggcccctggtatggtcaggaaaggagcacttggagaggaggagggtcgtgagtaaaggagagagaagctaatagggacattagaggatgctctctagcgggctccctccctctgtgtggctcaagggaagagaggcttcattcaaggcctggggtctggagaggtcagcaggggaccgcccgcgggggtccttaggcctgtttgggggagaaccctggtttctatcctcattgggtatgtgtgtttcctgacagattggttaccctcgtgggcctcagtttcccgattggtttattggcagtagcagttctcccatgggcttgtgggtagaaaaattctgcacatacaggacacgttctggagctatgaggatgagtgaactaggctaagatcctggccagttacctcagctccacatctagccattgccccagctccagcagctgttctccccgcctgtgtgtcccccccccccccaagctcctcttattgtgtactcaagaggcccaggagacaaaagtccaggaggtcaggaggtgaggccagaggagctggctgtgaactggctcccagggacaaggactcagacacagaacttaatgacctagggtatgtggggagagaggcctccctgggaggagggaggctggccgcctggcagagcccaggctgagcttggcactgactgaggcagaggcagcagcttcaggccacacaccctcaccatctgtgtgaccacaggctcctaatctgtcaggtagatccagagtctgcctgagaggaagggtgtgaggcccggggccattgcccagccagagggcttctctgctcctggcacctgagacgatgcagaggtggtgtctgaagaagaggcttaggctctagatcaggctaactgccactccagagaggatcaccatatatgggtttctgtacctggaagccaggtgggcagatgcccctggggaagggggacttagctctcaaaaagcatacagggacccacaggtggaaacttaaaccagggagggcttcacagagtgggaaggctggctttctggttcttctctttttaaactcctctatctctcatgagaaccatggtagacatctgtgtgctagcccgcgcttcctgctttggtctccactgttgtcccactgaaggcagttttatccttgtataagtgccccatcacaggtgagcgtccacagaggtctgacacctcggagggtggggctgggcaggttgtcctaacaaaatgcctgaacaggaaggagctgagggggatattgtacagtagccatctcttcatgttctgcacaaccttgagcaagttgcctcctgcctgaacccagatgcacccacatcctctataagcccataaaatgtcaaggatgttaaggcctgactcccttctgccaggttgcccttggcagacattgccagtcaattgctgccctcttcccctgcctcgttcttttcctgaccttggactctctccagcactccgggcagccagtgccaatcagtcattggggcctatggtctgagacaggtcgggtgcctagccttaatgtactcaggggtccctctgtgtggttcagagggccagggcaccacagctggagattctcagggagaccttctttgagggtaggggttgttctaaaactatttaagcgtgagggtcggttactaccagccatgcacattccaaagcgcctgtagcctggaatttatttacagttagtgtttgctgagctcttgctggacaccctttgggcacccgcaggcctctgtgtctctgaagagctcaggccacttcaaagatgaagcaactgaagttcaaactgagtggcatagcttacacacttcagacctgggactcaaaggccatagcctagggggtgtcgggcagacgggacagcctcttgagcaagctgtcacttgctctgaagccttaaaggtttctgctaggcgtgcccaggaagagcggagtgtgtcgagaatatcatgtcaggtaggaaaggaccatcaggatgtggccgggatgtgactggcagttctgagcagaggagcaaagaggttctaacttaagtatctagcatctctgccaaccagggtgctgtgcttggtactacctgctcctgggctgctggaagccttggacggacgggggtacatggtaggttgacatccaagaactgttgaatgaatgcatgcatgcttcgagagcagagttttcccgaataccctgggagtccagctggaatccccaggcctggcaggggagtggctggagaggagacttaagcaggtccccagggcaggggccctctcagccctccacagccctgctgtctgtcccagaggcctcttaccggcttctgccgtgcagcctgcacctgagcagcctcacccagaggacagtgagcagggcctagcgcttgggggcggggtgggggtgggggtggatgaaagatgaaggttcgtgaccattttttaactcaataaagggagagacaagctgcaggctgcaggccggagatataattagtccgcagcagtggcgctttcttgatttagcttctgagagaacaagacaagggtgtgatacccaattagcagtgacatctagtcggagcctcaatagctgagatagcaagctgtttttatgacttctctctccccgagtggagcgggcagggaaaggtccgtcaggatcttatttccttcatcatgggacaattattagtgttctcaggatgtcccagagccaaatgaggcattcgttaacccaaacaactgagcattccccgggcggcagctagggcactcctggacagcagctggagccccagaccagcaccaggagcctgaaggtagcaggagggtacaggcccctcatcctctggaagcctacatgcgggaggagggtgaaacatacaaagccattcgtttggcagagctggctcaggtccttgagagagtcttggcacctgcctcggtttccctacctgcttctcctaggtggaggctgggctaattcctctggggacgagagtgagtcagtctggcctctggcagttcttcctggcaccattttctatcccttctgccaactgggctggaggctctggcttcttggccctgcacctgcatgcactgtggttaagaagtcccctacccccacccctgtcactgcatgcagcacctatcctgctgccgggggtccggtttctggcagcatctgactacaattagccccatctctctgtccttactaccctgtaatccaggcgctcagcactagccaaggtcttacccagttgtctggctatcctggtaaagtccaagggggagtatgatatgcagaggaggatctcgccactgtttctctccgtctgtccgtctgtccgtccgtccatccatccgtccatccaaccatcaggcctcagttcctgggctgccatctctcctgtggaatcttgcctcaccccaccctacagctcctgtctgtcagtgtggagccttccactcatggttcagacgactgacgaatccagccatgcagagtgggagtttaattgcagacagtttttacggatcatgggcccatctgtgctaccatatgcaaaagggaaaaaaaaccctcttttccctccccccctccctctctgcattgcaatcccaaactaaaccagaaatgctgttatgggtttttggccgaagccagtgtagaaccgtggttcatcgtgggaactttctgggggcatgaacctggcaaggccggtgtatcccagaggggtccaccctgacagtgggcaggatggcagaggcttggccagctgctcccaaccccaccagatcttcttacgagtctgagcctttgcatatgccatgggtgtccttagacaccggctggaggccctctgcatgacctctggctggatttgacgtgtagccatgtttgaatttggggtttttaggaaatgcgattctggtagcagggctggcagatcatcactgattgttgtgttctcctggtaccccctgtgctgatgccctgcctggctatgcatttgggtgtgtgttgggggtggtggtcgtccccagatggggcttcccctcggggccccaggggcaggtctcagcagcttctgagaggatcaccttgtgccccatctgtccaggtttggtttccagactgacgttagttactgtctctccactgtgcctcagtttcttctactgtgtattagagataaggctgatggagatctatacacagagtaccctgggagccatcagctcccgtcatcctgaagctatgtgtgagccccgtcacggaggctgtcccttgatgcctcctagcttctgaatagggcgcttgatgactttgagacttcatgagcggtggggaggtgtgaaagagagttaagcaagctcccgagagaaggcgcgagccacatgggagccaatgcgggagtctctgagcaagcgagtggactcagtgcctggacagtgcagtggatacacaagcaaggcactgaatatgtgagtgagtgagcgagcaaggcattgagtgtgtgaacaagcacatgagcaaagcattgagtgtgcaagtgagagatcgagcacacgagcaaggcattgagtgtgagtaagagtgagcaagcattgagtatgtgagtgagtgagtgagtgagcaaggcattgagtgtgagtgtgagtgagagcaagtacaggagcccagtgaatgcacagatgcctgaacatggaagtgaacctatgcccaagtgtgcgagtacctaagggagcacacgagtgaatgtgtatgtgtgtgagtacctgagcaagcgcatgagtgagcgtgtgtgtgtgtgtgtgtgtgtgtgagtgagtgagtacctgagcaagcacatgagtgagcgtgtgtgtgtgagtacctgagcaagcgcatgagtgagcgtgtgtgtacctgagcaagcgcatgagtgagcacgtgtgtgtgtgtgtgtgtgtacctgtacctgagcaagcgcatgagtgagcacgtgtgtgtgtgtgtgcgtgtgtgtgtgtgtacctgagcaagcgcatgagtgagcacgcgcgcgcgcgtgtgtgtgtgtgtgtgtgtgtgtgtgtgtgtgtgtacctgtacctgagcgagcgcacgagtgactgagcagccaatgagtcattgtgagtatcagcctccctcagtttgcggggtattcggagttcccccataaccccctctcttccctactgtctagaagtcactctgacttcagttcaagtgaggaaaacagactcagagagattaaggggttcctcccaaggtccatgcggtggagacaggccagagctgtgtgtnnnnnnnnnnnnnnnnnnnnggggggtgtataggtgggtggggatggggagggaaggggggtgagggaggggtaggggggggggagagggaatgaggatggatggagatgtggggaaagggggcgtgaaggagaatgcgagggaaggggtgaaggtagggacggtgtttggggtaaggaaactgaaggtggggagttcagaaaatagggtgggggggaaaggaagggagcagtcgagggaagggggggggatgataataggggggggagaaaaaaagggggaggggggagtgggatggatgaccaagtgcgatgggagagaatgagggggtgagggtccgaggcgaaagagatatggggtacggcgtagaggagtggtgaggggcaggtgtaaggaaaaccggatgagaattgtggcttaccacagattaggtaaggccctgaggtggaggtttgggggttgatcaagaggaccgtgaatatagtcaagaggggaagcaagtgggattaacagatgatttaacaaggttgggtgcagggcggtgacatgggagatggcacagattgggaaagtaatggagaggtaaactcgaggcgttgagttaaagcacgagaatagagattttaaaaaatctgggatgtggttccacacattagcgatgtcagtgataataaagtagggggagccaccccacccccccgccctgccccgccccaccccgtggtgatcaccagcccccgatgtaatcattaaaactattagaaggaaacgtttgcttgaagcaaatgtcaggcgccgagttgtgctttgtaaacgctcacaattaatgccaatcaggccgggaaaaaagccggcccggaatcctgtctgtctcatctcatttgtcagctggtgccgctccgtgtcgcacattttcatacaattgctataaacataaaagggaaactccacagtgttccaggcacccggatggtgcgtcgtcttaattactcggtactccgctgttcacatcgctgcccccagctcaggcagataggaaacaagaagatgttgtaagaaggttcatggttctaggggtcagcactgatgagaaggcaggtggcccagatccctgggccccactctctccaggtgaagactaggccaagcatggtggcgcacgtctttgaccccggcgctgcttaggcaaatatgggcggatctctgtgagttcaaggctagcctggtctacaaagtgagttcaggacagccagggctggttacactgagaaagcctgtctcaaaaaaaaaaaaaaaaaaaaaaaccaaaaaaacaaaattagaaaaaccattcccaagttctccactgggaccctaggctacaaagtgtagtctagctcctggaatggttgcctgccagaacaccgtcagcgagcttcagttcctatcctgggacgtggggagagacctccttggtcaacacatcaagcttgctagacctggagacatcatgagtctattttctcagattaactgtagaccgtggagggtggccatcctcttacctacagggagaacgaagcctgaagtctcccagcttggatttgaacacttgttggtggactgtggccctgtggccgtgctaccatcctatgacacactgccccgcccttccagagcagctgtggggttgagaggagatgaggtagctccaagtccctgtgtactatagatgtctaataaccaatggccactgtcacagaacctcctgaagacaggacctcagggcctcctggcctgagagagccagtaccgtcgcatttggactttgctagatgtaaggagtactattgcttccgtgtggatttcctgaggaaaactgaagagctgcacaatggctgcttcggcccaggagggtcctgcttatcttctgtcccccaaaaggaacagttccccaaactcttgacagccagaggttccttcgtgacgtggctatgagttgcagaaactgggtcttgagacctagagtcctcgtcctctcgtcccttcccgttgcacctggatggaagccccactatgtgctgcacaccctcccagggactcccgagcttcagcctcatgctccctgtgcacagggccttctggggccaggctggctcagcagggacacactggcctttgtgtctgcccagccggctggctggcggggcggccagcagagaagagagagggtgctatgggccagcctggccaggaacaaatgctcagagagaaatagaggctcctttgttgtggctctcagtgggggaggggtgctgccagctgccagcccatgtgatgaggccaagacctcctcagaggttggcccagcaccccaggggaccagccggaagcctctcatctcccatctcctcctgatcctgtgggtctcctccttgttttggagagactttggctgctggagcctccacagccactcagcccgatttgctgtgggcctactgtgtgctgccacggggccaggcccttatgagcccttgggcctactgtgtgccaccacagacccttatgaaccctgataagacatagtagtcagacatatgcagtggtgccaatgctgtgagccccaagcatgggctcaagtgcaggatacccatgggacaaagtgccccaacctcggctctgactctgatgacctcccatgctgtgataaccacccatggcctttgaatcccaaggcaaggcaggggtcccaggtgagagaagacttagagatctagagaatggctaaggtcgggctagagagatggctcagcggttaagagcactgactgctcttccaaagtgagttcaaatcccagcaaccacatggtggctcacaaccacccataatgagatctgatgccctcttataatcataaataaatctttgggccagagcgagcagaggtcctgagttcaatcccccagcaaccacatgaaggctcacaaccatctgtatagctacagtgtactcatatacataaaataaataaatctttaaaaaaaaaaaaaaagaaaagagccgggtgtggtggcgcacgcctttaatcccagcactcaggaggcagaggcaggcagatttctgagtttgaggccagcctggtctacaaagtgagttctaggagagccagggctacacagagaaaccctgtctcaaaaaaaaaaaaaaaaaaaaaaaaaaagaaagaaagaaaaaagaaaagaaaagaaaagaaaagaaaatggctacggtcatctggtttcggaggagagtcctgtctgagcctcaagtcgcccatttccagagccacagggttctccagagtgggaacacagacacccacctcctagtgggatagctggtgcttggcctcaagagaaacagagctgtcaggttggcttggttctgatttggttctaatgcccaagactctaaggcgcgagagtgcaagtgttaattttgtggatcttaaggaggagtctctctgtagcctggggcgtggggggagcctaggacgagttctgtagccaaggttgtctttgacctcctggcctccctccctcggcctccctgtgttagaacgacaggcatgcactaccatgccaaccacacttctttttctcggttttttaattgtacgcagtcagcatcacaaagaaaagctgtgtgcgggcagatgcgcacggttcatcagcgctgccatgtggtctttgattatgtcaaaggtcccaggtcagccctccggccctcagaacccaccccagggcccccaaaaatgcccccagaaaacacctccagctgcatctgctctgccagaggcaggaggcagggcccaagccccgtgagggcaccacccagatagctataatcagcagcctcgccaagacttcaaactcacccaattatcctgcgaggggaaaaaaacacaaaatgaaaacaaattaacatgtttgcatagaagccgcagcagcaacacacacagaagcataagcgcaagcgcgctcctgctggcgtgtgccctggcaaggctgcgatgtgccgccactgcccctcctcttctggcatctacctggactaagacagcagctggcccagtgaccgactcctccccacgctggctgggcatagcctcaggctacggctttcagtttctttcatctttacagtgcactgggtattgaacccaagatcacattagccaagctcttgactactaaactatatatgccttaaatttttttccttaataaatgagtaatattacataccagacttctttaatattgcataccgaacttcttcttccctggtctataagatatgtctgttatgaacaaatagagaaaccagagcatgaagagattcgtggtcctgcccaagcctgcacagctggctagtgggacaactccagacatggcactctcttgcctatgggtccaggggtcagggcttgacctggcctctgaggacccatgatatctccagcctgtgtctttccttgcacatcacgtgcacaacccccctttgccctgtgtgtgtgtgtgggttttttttttttaagatttatttatttattatatgtaaatacactgtagctgtcttcagacacaccagaagagggcatcagatctcattacagaaggttgtgagccaccatgtggttgctgggatttgaactcaggacctctggaagagcagtcagtgctctaaactgctgagccatctctccatgtattccttatagggacttcagacccttctgtggtttcccatctgctgtggtttgctgagctctgcctggctcaccagaccctccagctcctactgggggcttttgggttctacactaaggctcccctagccctgggtatttagatgtctagccaagcaccctcctttctaggaagctgtcagtcctgcatagcaatctcccgactccctaacgtcgcagggcccaaggttcaggttgctggcttgtgccttgtcttctgtgggtcttgcgatctggtgcacacaggtgctttgaaaaggtttgatgaatgcgccctgtggtgccctccccttctctctctgggaggtaaagtgtccacctgctgcactgggttagggtttgggtttgggtcctgcagcttaatggtccttgacccctctggttcaatgccaccatggacagatccttgcctatgttgtcacctctgtagtcatgaagagccaagagtgagtgacaggctagtgctgtgtgtagcgtgtgtcatgcccaccgccgcccccccccacccccgtcttcattgcagccactgaaggaggtgtgtggtttctaacctcacatttcagatggagaaactgaggcaacaagggccttggtgaaccctaccggtgagtggcagagctgtttggtgttttctggagctgaacctagcaagactatggaagtagtgcttggtggatacagaaactgggtcagtaggacaccatgacagtcttactggcttgagggtgagtttactggcctttagctggccccattgtcatcagactcttgacctacatcacggcaactgagtggggctggagcagtggcctgagagagtagcccagtgcccacccccagtaggaaccagtgcccactgagaggctcagtgtctccctcaactcatgctagtgacgtgagaggcaggcaggcatggattcatgttctggctcgccagatgaccttgaacaaatccctttcctcccatggcctctgtagcttccccatctgggcatagcaagcctgagagacaggtcctctggcctgctaccactagacgaagcgaggggacgcccctccttcaggagcttcccggccctcgaacctctgcgactcagatggagacactagttggttcagcccatgccccaaggacaggttaaacccaggaggaaactctctccagcctgcctggcccacctgccttgaggggtgtgtgttcggctctctgtggcccacacgtgccagcgtttgtcaggtcggggtgatgcaccatgtgattaatggggtgggtggccccaaaagtcagataagctggctcagcccagccatacaggaaagaactgtgagcccaagaagcaggaggacagaagcagaaaggcccagccattcctgccttcatcagggacttgctaagtatctgctgtctgcatgtctggctggagcccccactgcatcgctgctgggcacccctgtggaagccgcacagcctctctggatctagccccagagtgcataaagtggggtgcatgtctcactgaggtgacattctgtacccagcaactgagaatctaggtcaggaagttccccccgcacccccctcataccccatttcaggggagaggcttgtcccaaaggccaaagtagagttataaatggtgacaggtaggtcactcttccttgagttctgaggaaagatacagggggtggattataaacgccccaccccacccccatcccataatgaaagccatattgtttcattcagtgtttggaagagacaggcccaaagaacatgagaagcagccaccatcaatgccctgagctaggccatttgagggagggtctgcccaggtatagaatgcctgagaaatgtccaatatgcaccctgcagcagtggccagcctgagcaggcaggcttagtggagagagtgtgggcatggtttatgtccaggacccggccctaggaagacccagctgtgctcagcctgtcctgagctcacagggtcacacaccgcagcccaggctctggggagccacctctccaccccacccctaagcagccctgttgtctggcatgtgcaggcgccgggtggcccttgttgtacacacatctgatcccgtcttttccacatcagatcatttgtaaccgtcaccaggcagtcggcccattgctgattcaatcttggctttgtgctgtcacagccgtttctccatgcaggctgattttgaaaggaggcccttcctcgggtctcggtgaatgggggaggagtgtgggtatgtgtttgcatgcatacatgtgcccgcgcatccccaccccacgtattggtggacatatatgtgagcatcttagccccctgcctatcatgggttggagggatttgaaatgaactaggcagccaaggggttcttggcccactccctccacattctgactctcctctgtcttcttaaatccctactgtgtgctccacctactgtgtgctcctgagcgcacacgcagcagggtctgtgctacagcagctcagacaggaccttagccacaaagcaagaggttgattcaaaggtgccacagggtgtgggtgggattgtggctgtgtggaaggtggttaaggagggcttcttggaggaggagttattggatggagctgaggcaggtctaaagaggtggggctggctgggcactgccacttgtggaatgtggtgacagggacaggctgggggacagcgtagccaggtggctacagagtccgaactgagacgtgcaattggtgtaccatagatttcaaaggcttagtgcagtaaaagactgcaccgtgcctggtcagtgcctaaaatctaagctctttctgtggctctgttagattaagcagggtgccttgctaaattcaattcctcttggctatagagaatttatacttacgaatggagcctgcactgaggcttgttctgttggtcagtgctgttcggaaaagccagggacggcccccacatgtggctctctgaagctcataagctcccgagttcacattggtagccaagcattggtgctactgggagtgggaaagccttcgtcagaaagaaatgctgtgtggccaggcagtaagggagtggtggggtgtaggctgtcccgaggaagaggtggggtggctcagggaggagagtggtgtgaagcaagcttcaaggcctcagctctcaaggagccaggtctgtggcagcagagttgccgctggaaccagctgtggcatcctttggcccctgaaagctgattgctttctctacttctgagtgttagagcttgtggtcttctgtctgtctgtctgtctgtctgtctgtctgtcccccctctattcagtccccctccccccccaacagctgctgcccgtcccatgagtgatttactctgaggccagcctcctgtctcctggtggccagagactggaatccctttccaaacattctgagaactaacaaaacacagggttttgcttgtctgcagcaggaaggctaagccccaaagcgcacaaagaagaaaatccgcctccctcccccaaacccaaggcaggcagcctcacaggggagctgaaattcaaagccaggtgttccagctcctttggaaactaaggtgcccagcgactgagtgacagagtgacaccgatgggggcttttcatgaatggggggagggggcagacacttgctcacagcagagactgaaagccagggacagcccccacatgaggctctctgaagctcataagctcccgagttcacaatggtagccaagccttagtgctatcccagagcactgtccttgtcccaaccttgtcctgaagacaccattcaaccccagctctggacacacctggtgatcttggctttaggctacagatcaagagcagccgcttggtttctccctctcacggatgtttcttcattgaaaggttaggacctttcctgcctgtctgcctgtctcccctcaattctgtataaatccagaggtcccctgccagaggctccctcatctccagaacttttctgctttctctctcactcaccaacaaagggttccgctcagccccttccccgggtgcaaagccttcagcattgtccctgtggtagagtgtgttaaatgtggcaatgtctgtgacacactgaacccacaaggaaacacacagcacccactcacctcagctcttatcactgcccccttctctactgtctggcttaaccctgaactgtgggtgcagagattctgggggagcccctcgcactttagatggctctaactctgcatacagtgttgcctttttggagacccctcacacccgtggtcatctgattccacttttcccttgggctcctccagaaacttacagcctccctctgaaaaataccagatcctccgggccctatcctcactgtgtgccataatgccaatagttcatatcgactcctggcttctctcaacctttgctgggatatagcagacaggaccccacagttccggacttgggatatggtactgtagaagagaatacttcaggtcagactggggagagggtctgcaagacctcttagctaggacctgactcattaacactagtcttctgccttggactacccagctcatcgactttgttagaacttccccctgcatggccctggctctggtgcttgtaataactgctcctctgtctctgcagcagggaatgccttcgaactttcatcttgtgcttctatccctacaccttcgagtccctccctgtgctgagactacacttcctgttctcctgaaattagggcctgacaggcttcacagaaactaggtgcttttagtgtccacccccagccccatcaaggggtattctgtaacagctggagatctcccaagctctggttcttctgtccctctggaccaccccacccacgctgctctctgtttgctactttgtattaagtatgttacaatgtcctatggctctttaggtagctttggcatcgcttggtgtatcctgtatacatttttgggaaggaatttttttttttccggagacagggtttctctgtgtagccctggctgtcctggaactcactttgtagaccaggctggcctcaaactcagaaatctgcctgcctctgcctcccaagtgctgggattaaaggtggcttcaaggaatttttttttaaagttgtattcactgtgtgtgtgtgtgtgtgtgtgtgtgtatacaggggagatgtgtatgcatgtggagacgagaccggaaaacaactttggggaatctattcttagccttcacccccactttttttttttttttttctgcacactctaagctctcagggcctaggaacttctaagatgtcccttgagcctccaccttctgtctcactgtaagggtgcagggactggagatatgtttgggtgcaccacaaacaacttttttctgtgagtttcaaggatcaaattcagattggcaggcatagcaggggccttttcgttctgagttattttcgccagcaaattccgtggcaaggaatttgaagaaattcaggctccaaccaaggacctggcatacagtatagggttaatatgttgtcccccgaagcaggcatgcgtgggagaaaggcagaaacagctggttccggaggtgactggcatcattaccctccctgacttggccccacccctttctgggcctttgctcttggagctggccttggtgctgaaggtcttagggccaactcctacctgcaacgcatgcactgcctcacagtgagactaaggacctacctctcatccatccttccctctggagatgtttcccggagaacctactgtgtgcgggcactggtgacccatgtgggaagggacctacataaggagccacttgtcacgctgtgtgtcttccatctttcacacagcctgggggatctttgaagccccgcagcatttgggtttcaagtgaaggtcgagaagcatcctaaagaatattctcccagaaggacgggctgatacggagaagcaactcaggagccaggtccacagggtgtgggcgagagccttgtgacaggagaggcttagtgttcctatgactgtaataagatgctgtcaccaacaccgacctggggaggaaagggttcatttcctcttacactctcgctcactcgggtcacaccatcgctgaagcagagaccatggaggagtgctgcttacccgaggatcaccagctcaggggtggcaccacccaccgtgagctgaactctcccactcagccagtaattaagaaatacactccctcctttgcccacaggcaaatctcatagagacattttctcaagttcctctccccaagtgaccctagcttgtgtcaagtggacacgaagcagcacagaagcccacacagtgatcggcctacatccagaatttggggtttccacagtctatacctttgccccagaactaccagtgtctatggctgcaacatcctccccgaaccagaatttgaaaatagcaggaaaagactggatgcagaggtgttggtccagcagccagagctgggcatcataggggcccatggcctgtgggctgggacaataatcctggcagtagatgaggctcctgttgaaggagcagtgctccccacccccgcccttaagagagtgaaaagcccctcctcgtgccagcccgcctggcagtggggaataatcacttttcacaagacccttatccacaacccagccctgggcctgtttaatcagcagtgcccccctctccccgtgactggaagattccctggctagagaggtcgatagaggggttaaagaaaattaccctggcctcctccatgctaatgtaatctctaaccagatctgcccagccgcagctcaaattgctttttagattaacatttaattattaacagggtcccctggaaggccttgggctctgggaatggagatgggggagggagcagcaggaagggggggggtgggcttctgctctggctgcttccaagagagagcaatgggaagagagtccaagaatagggcataggaggccgaggggtcaggcagggagaggcagacagcagagaggtagccctcactatgtggtggccgtgaagcctggggaccctggatgcttctctgcagtgggctgatgcttccttgcagttggtgctagtgactcacaggggagtgatctctctgagccaaggccatgcagccaggctttgaccccagtgcccccagcttggtgcagcatctctccttcctgggtctgggcctcttaacactgcaggctcttccctgtgtcctagggtagctgtacagtcagggacaacatgatggggtgggggactttacagccctcctgagagttgagcagagtccatgggaacaaaccactgggctcctcagctttttatctccactatgggttctggctccttctgagctaggcactgcttctttttatatgacaacaggccaaggacccaaccccctgggtctcccacccagctggtgttatggctgaaaaatgccatgtccagactggctaactccccaccgaggttcagccagggaagtactgtgacatcctaggtaccatgacaccctcaaagtctccccagaccccagcgccgaccccttgcctggctgctccctgtaacgggtgcctggcgtgtcattcctgtccaggctgaggcctgtacttggccttgagcagagctgcagagatctgcgtgggcagttctagataaaggcaaagatggaggctggaagtggctcgggctgtggccttcgtggagacacagccttccctagatagaggcctcactgcaggggcagatggcattctcttccaggaggggtgcggggggagggtatgcggtttcccttctgagggagaattggccagggcaatccattttcagcttcccttggacttagccagggagggcagttctgggggagtagtggcaggtcacgctaacctgttaccatgttcccatgtgtgacataagggtggccccgaaaaaggtacttgcaagtgtcactgcccaagtgggtgagtgggggaagggagggcagggttccttccacctgctgcatggcacagcctgctgttctgttaaatggttacgggatgagcgggaggccaatgaggaggcctatgctctcttcccagcccctcccagggtagagtcaggtggactgtgggccttgaggagaatcagggccttgcatctatcccttgatggtaggcttctgggatcctcccactagggcagaattgccattcagtaacctgaggttcagggtctgacactcttgggctctgccaattgaaaatgtgtctgaccttgcatggtgtgcacccctgccgctgccgcccccgccccactcacagtgactatttcctcctgtgggacagggagctaaacccaggctctacccaaggccaccatgtcccacagctcagtggagagacggcacgtattcagatctgcatgcagaaggttttttgcatcgtcgaaatggaaacacttaacagctgtcctcagtagccagcaccttgtttgtccccaagtctccctccaccctcttgggactccctgcagtccccagatacagagggagatgacagaaggccgcccccccccaaccccaccaaagactcttctttgaataaaatagacagcacagagacagcgtctgctctgcttattgtttggtcttgggcagcagactcaatgctcctcagcgcaggaagtttctctcctcctccatccgctgtcacggctccttatctgcagtccagctttgaaagggcatttcgacagccggggtgttatctggtggagggaccttttccttgggtgtctcccagataagacgtcttatctaatccctcgtcagggacggtgcccgggcaccgtaatcattgaggcttgcgacattgtccctccccccctttattattaaagtcacaaaaggccttgagcttataaacagtccgatttgcagacagtgcagctctccagatggtccccggccggtctgtgatgattccgtgctggggggttgagggacctgccatctgcagatggggtggggccaggcaagtaggaggcaggctggaaatcagaggaaaggcatgagtgttttaggtacccagtagagccctatccctggcttgctgtgtgaccttgggcaggacccttgatgtctctgggcttttcatacagttcatctcatagcttggtgtaattggggttgtggcaacaagggacacccagcggagacgccagccctgaactaaggtgacacctaaggtgaactctgggtgacagtgccacaggcagaaggcacagcagatgccatgatcttggaggtcggaggcagttagaaggagggccttgagggagccttgagagactgggcagctcagggagagctgaggccaggcaggaagggggatggctatgttggaagaagtttaaagaccaaagtgttggtgtgacatggaaacttgggatccgtatcgcattccctgtaattgttggctgactcctggctcatctgagacctgttccccaccctcacagttcccaccgtgggacacagggcttgggaagacgggacagtggtctgggtgacttgacaaagcagaggagaagcccccccactcttcctctaagtgaggctggtgtcactgtggctcagtcagccagggtcctccagaggtgagaaccggcaggagaaccctgagaagctaaggtagtcagttccttccaggaccagatgccacaccggcctaagctctgtctggtggccccttgtcttcaagatgcctgggcattctagcacaggaggctgggggcccctggaggcagctgggtccaccttgtggaagtcagacagttctgggggcctctggtctttagtcagcatccccggtgaagagagggcctgggtggggtttgtgcgtcaggatggcagaaaacagatgctgtcatggagagatgcaggcagggtcaaggcaggtaccaccagccttgggtgtggcagtcccgtgtccccatggactgtccatgtagacatttcaaggacctcacccacatgacgaagtgtgacaccgatacatactgcgtgtgcccaagtgttcgcctgatggagtggactgtggcctcaaggctgtggcatatggcggcggtggccccagcaggcctgtttctgccacgtgcttccatccctggtccctgaagagccttgctcgctcgctcactgccttccacagtcaaggactttcatcggagcaataagccccacttcactccctccctgagccgagtcgttgctgcctgattgtaatggcatattttaaaattgccagaaatcaaagctgggaagtggatagatattgctgcttttattgcctcgctgtgttaagactggagcctgggggtgggggtggtttccatcacctgtcggcatatttttaagggctgatgcgtaattcctcaatggagcatcagtgttgatggaaacgaagatagacattcatttaatcaataaaagtgatcaaaaccacatcaattgaaacgctgttttatttnnnnnnnnnnnnnnnnnnnncatcccccacttcccttttctttctctttttttttcttttttcttttcttctttttttttttttaagacagtaataggagaaaattggttttgaaactgaataaaagtccctttcagaggaagccgttactctcgggtacctttgctgaaagtaaaatagagcgtaatgaaaggtggttacgcggttgtctttcatttacggagaggccaggacagacgggaggctgccaccgtctcggggaatacaagattggaataattgcgcggtaacaaggagcttgttgtgaaattagtatcttaagaaactggtgacaaaaagggttttcctcatgaatacttcattattagaagctgcagaatctggggcttcagacacctgtttagtattaaataccttcccctcctcccccttaagcacccccctcctcctccttctaaccagcttgggatggaggcagcccaggctggctgccaggacaggggtggcagtagggaggagcccttctctgtggcagggagaaaagagggaaaacctgactgtgactcccttattccaaggctggcttgtgctgacaccagtgctcaggaaggtgggctttgtggggacacgcgggcttcctgtgttcccccccactccccaatccctggtgtctggcttaggcagatgaatacagcgtaggctatgagaggcacatctgagctgccacctaagggctgctgtgggtgactctggcccgacccttcatgtttggggtgagcacagtcagaatgcaatacctcaaacctccccatgataccgtcctgacatctcttcttcaggggtactgtgagaacaccccaaacgggtaccagactaacacattaaacaaggacactgtgccctctagccctacctggctactcctgtatggaccccaaaaatgaccaaatgggtccctctcctgttgagctaggcactgatttatcatgagactgagagagagctgaggtccaccaccagccaaggaagatcttgaattaggacatagggtagcgacccacatattgagctagccaaaggcacatgagtctcatgagttctagctgtgctgtggtgtggtggagggctggccaccccttgagacctggttccttcctgcgatgcctctggggctcctctggaagtcaccctttcctcatctgagagagatggaatgtctggcccgaagccaggcagggtggcacgtgcctctgatcccaacacctggggggactcttacctgtaggctagtctggactacaaagagacacatctcagaagcaaccaatcttatgttacttggagggggtgctggggaggacagcaggttgcttggagcagcccccactgaccagtgcctcatctttctcttcgaaggattcctgctgcggaacgcgcccgcccagggctcccagctcagccatgctggcctgtctgcagaggactcagaacccaccaggccaacacctggcctgtccaagcaagagcctggatctgcgcaagtgtgagtgagaccctcctgacgtgtttcctcttcctgcacccagggacttgctttctggtcttgggcgtctgtagggcaggctatgccccagtctgatctctgtctgaggggttcatgcagagcttctacagcagagagagctagggagggctgtgctcatgcctcagggagcccacccaccacacgcctcaaactgagagttgggaccacagccctcgggagggaggcaggacgaccctgagcttgaagtctggacatagagtggggaagggcgtgggtctgcagggaagcacactacagcttctgccccatagcctggaagcagctgttgacactgttgcttgcttcttggactatttatcttgaaagtaacattcttgctcaacattccgaaggaaggaaggggtggagagaccaaagcccctcctctccgaggcagccgatgtccatttcctgtgtgcccacagatgttttatgtgcttcggcgaatgtgtgtgcacgtacatctgacacggctcagcactcgctcgcttggccaggcatcctccgggtcagctgccagagagctgcctctttctgtgttcctttctgtggcaagggctgaaccataatctatgtggccgaccccctgttgaaaccgtccacagcttggtttgataagcagtgcggcaggagagcctgagttgtcaccaggtgtgaatgagtgtgggggaaacgttcggcactctgtgatgctgtgggtgtgctctgacagctttaactgtcacaccctgggccgatgtgcagccctgtgtgaagggcccacctccctacatctggacccacacctgtgcagtggacacagtttaaccttgccgtctttgagaagacaaaagtttgctgacattgtgtccctatcgtttgaccttgtacactgtagctgttttcagacacaccagaagagggcatctgatctcattacaaatggtcagatggttgtgagccaccatgtggttgctgggaattgaactcaggacctctggaagagcagtcagggctcctaaccgctgagccgcctccccagcccttgtctggttttttgatggggtagtagcgtctgtccagcttggccaatgtgtgggcgctgcttgcatgtcacgcagagatttcatgtctctcctgatttgtcttttgtcttagaatctacctcagttcattcatacttcctcgtgttgcttttggggttcaaggcgacttagaggagccttcccaggcccccaagatacatacaaagatgcatacaaagatgcatacatacatacatacatacatacagtattgatagtattgaaaagtgttagcccagcacttgggaggcagaggcaggtggatctctatgagttaagaggccagcttggtctgcacagtgagttccaggacagccagcactacatagagaccctctctcatttgtttaataatttactggctgtaaagtgggaggctgagatctgtgtgtgttcaggaatcagcccagtgctgcttgctctcctttcttttctgtctggtgaccctggggattgaacccacggcttcgcttccgctaagccaagctctctaaccactgagctcgccaaccaggtctaccatgttctcattcacattttcatcccaccccattttgctctcattttttgaggccaggccttgtgtagcccaggctggccttgaactcatcgagtagccagagatgactctggcctcctgatcccctgtctctacctccccagtgccaggatacaggtcacgctacaaagtctggctgtttcgttgctgggggttgagtttactcagctatacttgaccctgttcagccagtggtgatctctgggtacactcaccaaggaaggccacatgagcaggcatgtcagcctcctcatagcaaccgaaatcccatacccagtgacagcggccacctccctctatccctcctccacacacagagaagttcaactctgaacttcataatcgactcattcacactatgtgtatccttctgtggttgttgttctgtaatcgcatttgtgtgtgagtgcacacacacacacacacatcactaggcacatggcggaggtcagagaaaaacttgcaggaatcagttacccatccccttccaaacacgtgtcctcgggcttggtggccagtgtctagcccttcctggctggctctccaaggtcagccacattgaagggtggataatactcactgatgttcgttggagcttctagctctgtgtcagtaaaccacccgtctccatagtaaccttgtgtacttgccctctgaccccgggaaccacttccatgcttgtagtgtgggaccttagatccgggtgggcagaaatggcgttttgtaatgcagtcttcatctccacccctgcccccagccaggcgagcctgtgtgttctgacttcctcttgtgtcccctggggatgttctggcttgctgctgcattgagctctcgtacatttggggccgggtttgcttctggagaggagggtgctctgatatggaggggaggggaggcagctctctgaatgctttctccagtctcttaatatgaatgatggcgtcacttgctgccttcgtgttaaaatacctcgctttcctgcttggaccccaggtggccatagggaatcactctatgacatactttcaggattaaattgttcttttaaattcttaccttaactttagcatcctccgctggtccgctgctgtctgcagcttgcccggtgctcaagccctcctgttttcttggcaggccctttaaaggtggagtcattccctccctccggttctgtttgtaactctgtgtcagttttccctgaagaaactgttgcaatcagtgtgttctgccattactctctcctcccccagttgactttgtatccgatctgcaaagccgcagcacctgcaggtggcatcttctggtctgcagctttccctgtgccaggcaacggttaatgtctgtctgtcaaagcctgctcacttcagggtgaaccagcccgtgtgccacgtggggccggtagctttttaacactgtccactgtttctgctctgataattttattctcctgctccttgagtgtgtctgagatccaggttcgatgtgtttacatagggctgagcagagaggtgcagtgttcttacggggcatctcaccccaactctggggttcttctctgggtgtgcagcttcgtgcagcgcaactgtggaggccagaggatgaccccaggttcccatgtttgtttgggacagcctctctcactgacttggctgccagcgagccccaggcatttggctgggttttttttgttttgtttgtttttttttttttttttttttgcttccccagtcctgcggttacagtcatgtgtcaccacgtcccacttactgggttctaagggacactggcactctgctgactgagccatctcctggcctcttcccctgttcttcttgattaaattagctaatgatacaatctactgtctttccccaaagatccatctctagtagttactagaaatattacccttttagggactctgagtcactgatttatcttctgttaaaatcttcctgcattttgaggttattttttgaatgagagacttaaaaatgtttctatgtgaatgagaaatagtgtacatcagctggtgtgtggaggtcgggcagaggacagattccaggactcagttccttgcttccaccgtgtgggtcccaaggactgaactcgggtcccagctgtggcagcaagtgccattcacccatcgagccatcttgcacgctttgcaatgatttttttttttaaaggaaaaaggcttcacagtctatattcgtattttgaattttactttccagttttcctatttggttgatttttactttaccctgacttatccgagccccacctgtccatctaaaataaatgcaggatgcccttttgcgccatggtcagcgatgcttctgagagtttgttgaggtctctgtatctagggacatagctccggaaagtgctttgtgatacaaagtaaccttggacttctttttgtgttctatgagaacttagaaggcagcgaacctgtctttgggaggcagagttggggaacacactcattctttctctctctggataaaggagccaggtgtggcttgctagggagttccaggcggccattttcttagctcagtccttagtgataccacactatttaacatgcctgttttagtaccataaaacttcataggaagtaagtcctttttaaaaaacaaatgtgtttaacactttggagcctggacatgatttaagatagctcacctttgcttctaaattctatttttctcttctcttctcttttttcttttttgtttttgtttttgtttttcgagacagggtttttctgtttttgtttttctgtagctctggctgtcctggaactcactctgtagaccaggctggcctcgaactcagaaatacacctgcctctgcctcctgagtgctgggattaaaggtgtgcgccaccactgcctggctgtggcagacattattaatcaatcacaattctgtatctcctcttgcactgtgacctggatgctctgcttgtctttaggtagctggagctttaactcatcagtagtatgtgtgtgtgtgtgtgtgttgccagagggtgacatcaagtgccttcctctgctctcccgtctctaaacacagtgctcaccaatgccaggacctccttgtctcccagcctccccttcatgtcaggccaaggagctgagctcaagccctcctgtttcccaggtaggtcctttaaaggcagagtcatatccctccccctccaaagttctgtttgtaactctttgtcagttttccctgaagaaactgttgcaatcagtgtgttctgccattactccccggagttggctttgtatccgagctgcaaagccacaggtggcatattctggccccagctggtaaagagaatgctcacactgtaactgtcccctagtcccctccagtggtcagcagtgccatcaccatagcctctcactactacctcacttcccggctttgttttgctgtgtcctcagaaaaaaaagatcccaacaccggggccccgcattccatcatctgaagctagctggcccccagtgtgctgctgggtgaccttaaacgataaatattctggatttcctacatatcaaatgctgctccatgccttgcctttcaagttgaaggagttaaatggcacttcatgcctcccaccccacgccccatatcccccgcacccttctttccaaacttagatggcttccttgtccagttgctttaccgaactgtcttgggttgacctgtttatagcccttttctgggcccctagcctctgtgatggtttgtatatgcttgggccagggagtggcaatatttggactggtagccctgttggaggaagtgtggtcttgttggagtagctgtgtcactgtgggtgtgggctataagaccctcatcctagctgcctggaagccagtcttctgctagcagccttcagatgaagatgtagaattctcagttcttccataccatgcctgcctggatgctgtcatgctcccaccttgatgataatggattgaacctctgaacctgtaagccagccccaattaaatgttgccttaagagttgccttgggccaggcatggtggcgcatgcctttaattccagcacttgggaggcaggggcaggcagatttctgggttccaggccagcctggtttacagagtgagttccaggacagccagggctacacagagaaaccctgtcttgaaaaacaaacaaaagacatcccctaaacttggctttcaccccctcccctgtttcaccccttgtgccttctctccctctgtgctttgtgaatcgttcacacctccccttgctctgccacttggtgttcccactttataaaaacagtggcttttgctatacatcttcccatcagtacatccctgcatgaagctctgggctgtcaccgccatctcttctatggcagccatcttctcttggggtgtaatttataccacccatgaccttgtcctccaagctttattttggtgatggccgacactcgttgttcaacatggcttacctctggaggaagtgagtccgtcttgcctggctgcttacaggaatttcttgcatgactcggaaaaactgaggccatgtctgactgaactttgagggtcttgcattcactcagttgtcctctgtcaccccccccccccccaggctacagagcatctaggttcctgcagctgggcatagctatgtgattttgtacttagccctgtgctctttagccaagtatgtcccatgagcctctcctgtcaatgggagagggacttaggctttgtgtttggggtgtcccctggcttcttcccctcactgatctgcatctttgcattccggccttagctcccacatgtagcctacaacatgcagccccacacaggtggagaggcacggttagacacctctggtccagtgtctgggctgtttctagttagttcagttctaggagggtcttgctctcactaggtctgtccttgttttcaggtaagggctcaacatgtagcccaggttagccacaaactcctggcaatgcccctgcttctgcctcctgcatgctgggattgcaggcatgggccactatgctctcatttcattgggcactggctctcatctcttttgccccaagcagaactcagagtggaagggctagcctgagctttgctgctgtgctgggctaacaccaaggtaggaaggtcttggccaggctgtggccagtgttaccttggacaaattaatcagccttttaggacctgcatccccttttataacaaaaagatcagatgacgtcaaaagatacaagaggtggggagccagtctgaaacccatgtccctttcctacttgagggaggttacagcctgtcttgcagaactataagaaccagcttccacgggtgcccagaacacacctaagggaccaaaacggccacaggttacatctataagagctgaggacagagcacgctatcccaggtgactagggaaaataaacagagatgtgtgtgtgtgtgtgtgtgtgtgtgtgtccacctctcccataggcctaagagctaaaccttcccagctggccagagttccagagtcccacacaggacctgatcacgcttggggctgaaacctacatcttagatctgcagggcctcagcagctaataaatatttgactttctcacggcagttgctgatagacaaactttgagtttgtgtgctgctgaaaatgcaggctatacagagagcgagcccctgggaggtgccaagcagctgggggctcggctcagggactgctgtgctcaaggggggtaggggagagatgaactgctgcctaaaagcagtggacagcctgtctcggactgtggggcttaccatcttccccaaaagcgcccagagactgagatggatccaaggaggtcaggtcctagctggaccccacgcagggcatctgtgtgactctagggaaggggctggacagtagcagccaattccaacactttgccacctcccctggcctcagcactcgtctccacagcagttgagaggttcccaaccccgcgcatgtctgtggaagagaaccactgaaggccacatgacctaagatgaggaggacggctcagtctgactctcagcctgctccccagttggccactccctatgacctgccatttggagcatctgccccagtgagcatgtctataaggggccgctggttttagccacaaaatgggccagcaagatggctcagtgggtaaacttgtatccaagcctcatggcctaagctcggaggcgacactgcggaggtagagagctgactcttacaagttgtccttgaacctccacgtatgttgccttttcacttccaaaataaaaaaatgtaaaataatagaaggggcaggtgcatcgtgcttatgtccttcctgagggggaggaaggtcttgtgtgctgggcgcctgcttcttatctgtctggaggattcagtcagactcaccggccagtgatgaacctgagggctcggaccttggagggagcaaagacccccaggccacactgcctgtacacagggagagaaagaaaatgaacacacagaaggatcacacatacaacactggggagaagactgtgactctaaatggaacttctaacacagaggctttttgtgtggacagccacccagcctgctgtcccttactgcctagcagccagtgtgtgcagaaagtgaagctgtgactagtggtgggcagggcaagggctgccagtgagcccttactctgcaaagacctcagttccagtcccacagccctttgtcctgtgttgcctggaggcagaggctcccgttgcagcccaagcaagccttaaatgacagcaacccttctgcctcagcctcgtgggtgccaggttataggtttgtgcccacagccagctaccctctgtctttatctatgtgctgcatgtgtcttctctgaaggggtcggtgcgctcttctttccacacagttcctcgacccttccgctggttatccaggtcccaagtgcattctgggtactggtcccgtttcatgtgcatgccgtgggagaagcttttcccattctagagctgacttcatcagacttccgagtcccctttgaagcaggaaccgtttgattttggtggcatccactcctttagttagggtgctcctagcaaggcctcgtgtgacccaagctgtcccgcggccgcccatgtacccttctgagcatttctagtcttgaggccagtgagggcgcagtgggtgcaagcacctgccgccaagtctgaggactgagttgctgcccaggacccacccacacagtgggcagaggtgtcgcctcatccatatgtgggacgtgcctgtactccatcccccacggtggagattaaacgattaaaagggtttcaaaaagttttagcttttccatgtaggcctctgatgtttagagttgatatttagagttgaaatgatccaaccttgttattctgcagctgtgtagttatcactaccaatatatagatacctagctgtctacaccaccagtctaaaaagaccaacttcagctggtggcgcacacctttgatcccggcagaagcaggcagatctctgtgactttgaggccagcccggtctacaaagtgagtttcagggcagccaaggctacacagagaaaccacgactaggatgataacgatgaccggcttctccctacccggttctgtgggtttcacatcggactctctggaaccctgacgtgccaccaatggtgcctctccttagagagtggcccgagtattgtaacttggcattgaggttcaacattagaaattgtttgggctcctctggatccccagaatttcagagcaagcctcttagtttctgcaaggaggccagcggagattctaacaggagtggcagggcctggaaatcagatgccaatcctaagtctcccagtgcatgaacatgggctgtctttccatttatttattattatatgtaagtacactagagctgtcttcagactcaccagaagagggcgccagataccattacagatggttgtgagtcaccatgcggttgctgggatttgaactcaggacttcagaagagcagttggtgctcttaaccactgagccatctctctagcccgctcctgtgcttttttaatccctgtgcctgagatggaacccaatgagtgccttgtgggtttgctcaacgacagttctactgctgagctacaccctctgccctggtatttaactttatttcctgaaatgtgagcatatagaactagaactgagagaacgtgagggtctggcagtggacaaagggcatgagagcccaaggaggaagctatggcagggatgagtcaggctgaccctcctgtggatggcgcagactagagtcatacgtggccaaaacagctgagctaaggggcgggtgagagactgaggcttaggtgagggacagacaagttagagtggagaaggatggaagtgccccccagcccccccttctgggatacagaggcctgtttcagtgtgtgcaggatgcccctagattaggcacatgtggcttcatcttgtgcccaaacacctgcgcatcttcccaccctgccccagagctaggccagagctcttagcaccccaagccctggaggtccccagccattaacagttacgcctggaattgtccagggtctgatcctctggtcaaccaccaggggtcagtagatgcagcagattggggtcgctgggacagccagcacggtgcccagcagacatacacacacacacacacccggacccccgagactgcttgagtccttcccataaagaccagagaacagctgctctcccctgcccagtagcctcccaccccctccctgtcgtcgacctcattaggcattccactggtgccaccagctaattagtgtcacgttaattgagcgttcaagaggctgccacctccaagggcggagtgtcacggtgaaggggaatacagatgaagggtggtgcccagggaccctttctgtcccagagaaacactcacactcactcactcactcactcactcactcacacacacacacacacactccctcccatctcagcttagaatgccctgggacttcctgatgctgaggaggaaaggaatggctgccagccctcccctcctgtgggaagaggacagccccactctgtaccctgaaatctgaggtccccggaactactgctccagggacatataccatgaatcagaaggggcctggccacctggggaggacccagttctaagctgctgtctgcagctccaggctcctgagcaggtcccttccctgaccctccagtctcaccctgcgtttctgtctaatggcgctctctcgctcgacccagtatatatacctcacaaagcacagcctgccctccgtgattcaggcctgggtactgccacacatctgggcacagaaccaggaattctgggttggcagctccatactcccccttgaacaggtatcccaattgcataccagcattagcaagaaccgaggctgcctaaggtctgcgtggtcagagtgaagccagagaaccaacgctggtcccttagcttctccgtgctgtggaccccacagcggagccccgccctctctcccctgccaggcagcagagtgcgaagccatctcttgtctccctgaggcaacattaaaccccactcagagggctggttttaattggcttaatatactcgttaataaccgcatctatttaacgcacctgtaaaaggcccataacattaacttaatggcagcgacagttctcctcagcacttcctgccagccttttaaatctccagacaagcctttaatgggggcttcatggatggagatggattgggagagagacaagcagggagaggcagcctgggtcactcttgcttgatggcatccctgtgtgtctaacctttcctgagaaaccaggcctcctcccaccacagtggtcccaggagggcacagtatctggcccagaggaaacatgtgacagatactgtctgtgcattcagggcctgtgacaggaagggaggctgtcgaggaagaagtgggtagtacctctgatgtcaccctgaacacaccttagtgggaggctccagaaaaatcactgtgatcagtgcccaagggacaaggaaggcgggccctttgcatccgctcccgagaccctctggggctcacatagtgtgaagccagtctactacaggctcagagaagggctgcggtacactcaggcacacagggtagagctgggacttaaaagcctgtctgttgtgctggagagatggctcagtggttaagagcgccaactactcttccaaaggtcctgagttcaaatcccagcaaccccatggtggcttataaccatcctttaatgagatctgccttcttctgagtgtctgaagacagtgacagtgtccttgcatatgaaaagagtaacaggcttggcagctgagccatcaagccagtgggggttgggtagaagcctgtctgtcacctgcctccggactggacacatctgtggattaacctgctagggcccttataaccccatcagtctttgtaccaccagctaggggccaaacctctgacacatggcctctctggagatttttatatccatccctgggaacctaccacttggagcacacacccagatgaccacagttgcctggggccaggaagtttgttctctgggttgctggcccctctgttaagatccaatatggctccctctcctctcatttcttacttacgctgtgtccaagccgggagcccctccagcccaccattcagtcctcactgaacctcactgctgactcccggggcatcgtggcacactgccccaggaatcagcaccaaacagccactatgtcccagacaggacaggacggactctttcccgtaatgttcctgggggaaggaggggggaggtgcttaggtcctctgaatgcagcatacctgtctgtggcctctccacacagctgggtctaggtgccggtcacatggctcttacaaagttaccttgagtggtatggaatacctttgatgccagcacttgggaggccagggcccgccatctctgaaaacgttcgtgaggtctacatagtgagtgccaggacagagagctacagatatagatacagatataaaaggtcagctcataaaagccactcctctgcccacccacactacagtctcctcaggaccatcaagccaccaatccagttcatgtcagacgaggggaatcagacactgagattttgagatatgtgcccaaggacacagacacgtccaccaccctgtcagcttgccaccatcctgtttctggggcttgttgatgcctgccacctccatacagggtgccagttccttagctcactgcctgcataacagagcccaggaacaatacggtgggtattctgcaggcaggggcagtgggcaggggtccagaatggataggctcaggtgtctgctggtcccttccatgatgaagacgccaggatgggtcccccaaaccggctagaacacaggagatggaactcctcacccggctgaggtgcccgctgccacaggctccccagcccctcagcccctctcccaattccctagggccctgtgtttaccaaacagactgacagcatgcgcgcttgtggctgggttttcgccacagaaaagtctggaactttgccaacctgggcccaggagccaagtagcccagggccccaagccaagtccactgcagaacaggctgtgtgaagcactgggggacagccagaaaaagtcttttggggaccaaggtttaagacagaggctactatgtcaaaagcgcacgcagaggccacaattaaaccaggtgcatgatgggaggctccagcagccccacagtgggcttacccaagcaccagccaggaaacagtgactgcccagtcagtcagtcagtctatctgtctgtctctgtctctctctctccttgaaactagatgatggcctcctaagggtggccctcagtactctagaccctgcctggttgtcacctctagtctcttcacctgtaaaaaagagacccgtgtgtcatcttaccttgtgaccctgtggctgatgggactcagaaacccaagagtccctcaggcccagctagggctggactgtctgcttctaacaagactcacaaggccgttgcccccacttctgtagcctctccacagatcctctcgggactctgttgtgggagagccacataccttctgaggggtcttactgattctaaagttcagccctgcctggatgggacccgggggcttgcaggggctcaagtggtcaggaaggcaggtctccaggctgcctgccacatgtcacacccacccaccctacctacatcacagggatgccgcccccaacactctcacagttgtcccgccctccgtgcacaagctgctcagaaaatggtggatgcagagcctggcactcaatcactgctggctgagacccctccaaacacccttctcgctcttcctcagcaccgccacctgcaggacgcccgctggccagaagggggcgaggtgcgccctcttttggtaacaagactggagaacaatcgtctccttttttccttaaggttttgaacacctaatttattccatccattagatagattttgtagatttaatcattttcacagttggtggctcattggatactcaagataaactcggaatgaaagcataatgccgaggacaaatgagttttcacaccacaatggcagacgctcgcctggaaagagagtttaaggggagtgagaacacacatggatctcatttttcccccctcccggcagctgcttttgctgagtctggtgggtttccacagctaatttcaccagtttcgttcatctgtaaaattgcataaaagtgacatttttgtgctcattatagcaactgctgatttatggctggcaaatgaagagcccggtcccttttttgcgggactctcagagcggtgctaagtgcccatgaaattgcttgtataatgtagtttaaatccaatcgcagagaaagattcccccattggccaaagtgacatttccattctccacaccaagtttattttaggctacttaagagcaggggatgcccagagcagggcaggggtggacgtacctgctaagattgagaggtgaagggaatgctaccccggtccatgttgtcactgtccccttccgcatcacccctgtacaacaccatctatagctacccagtaccctgagcagtacacttgctgacccgtaaggcttgacagatcccccatgcccaagactgttgctgtgcactttgggatgggaagcagcccacccccaccctcacccccagtttcactggaagttgccagtgtatataccctagccatgacaggcacatgtctccaactgtttggagtccccagtgtagtgagaagctactctggtgtgcacgggccctgagctgcctctggcctcccaaatacagagaaccatcatccacactaacactggaccatggctgtgaggtcagggctctaggaggaccagacaggaggcctccaatggaaaggatcttgtgggtgtccctctctggtgagactctgcccccagccagagttgaacaacatagatctctccctcccctactcaagttctgccttgtgcacagggactactaaaccctcccagatacctgtgaaggcagccttaggagcaacactgccctactttacagatggtgaagccctttgcctaagtccccaggaattacaatatcctggctctgttctgtgcctctgtgccccttggtacaccaaggtcaccctgctgacccggagccagtatcatccccattccacaagtgagaaaactgaagcttttgtaagcagacagcttgcccaggactacactgcccacctaaccatggttccacccaaatccctgccagcaacagtcgtcggtacaggtcttcctgtatgtatgccaccctgactcctgcccatgtcccccggcctcagaggaatctgtggtctggtctagaatggctcagggtgtcagaagagagggtcttaggaccagcaactcctcccctcccccagtgacagagccagttgtggccacctgtagtaagtctcacaatctaggatgccacacccagtattaacagggcagccaccatgagcgccctgcatcagattcacctcgccccaccagggacgctagcacaactagtcactgttaactggaaacgggttagggcttggggtactcggttggtagggccttgcctagcgttgtaaagctccgggttggaatctgagtagtgcataacagcattagggtacatgcctgagagggacagaggaatcagcttcaaggtcattcctgtataagcatcaagtttgagagcaacttgggacacacacacaggtccctatctcagagaggaaaaaaaatcgcaagcttgcctgtggccgaggacgggcgtgcatgtgtgcagtttcctctctgaaccttaggttttggtccagaagttggaagtgtgggaagaacggggaaaattgagggaaagggaccgaccaggcaactcctggaggcggtggggtgtgaggggctgtggctgccccgtctctcacttgtgcctctgtccctgcaggtgagtcagtggccagctctatgcattcctcgcgctaccctagcccagcggagctggatgcctacgcggagaaggtagccaacagtcccctgtccatcaagatcttccccaccaacatccgagtgccgcagcacaagcacctgagccgcacggtcaatggctacgacaccagcggccagcgttacagcccctaccctcagcacaccgccggctaccagggccttctggccatcgtcaaggccgccgtctcctcgagtgctcatgcgcccgccggccaccccaaaagcgtgctcaagagtgtggagggcaagcggactaaactgtcgccggccaccgtgcaggtgggcattgcgccttacccagtgcccagcaccctggggcccttggcctacccgaagccacccgaggcacctgcaccaccgcccagcctgcctgcagcagccactgccacctctgtgatccctctgcccggccggggccttcccctccccccctccaacctaccctctatccatagcatcctgtaccagctcaaccagcaatgccaggccccgggtgctgcaccaagcgcctgtcagggcgtggctgtgccccaccccagtccagctaagcatggcccagtccccagctttcccaacctggcttactcggccacagccggtctgccagactgccggaagggcacagaactgagccagggagccaccccagccctgacactggctggggccaccaaacctgcagggtatgcagaaggtggcctggattacctgctgtggccacagaagccacccccacccccaccccagccgctgcgggcctacagtagcagcaccgtagccggcaagtcccagtccccagagatttgtggcgggagggccttcgaaagggccaacgggtcgccccacaactgcggaatggggctgcccggcagcttcaccgtgggccagtacttcgctgccccttggaacagtgttctggtgacacctaccagtgactgctacaatccagcagctgctgccgtagtgacagagctggcaccaggagccgcccgggagctagccgggcctcctggagacgtactctcgggcctgaccagcaagagtgtgtgtaacacagcggtgctgagcagcagcctccagtcgctggagtatctcatcaacgacatccggccaccctgcatcaaagaacagatgctgggtaagggttacgagacggtggccgtgccccggctgctggaccaccagcacgcccacatccgcctacctgtctacagataaggtctgccctgcggacacacggacagggtgatgggggttgccaggccatagcacagggcgggaagctagcagggcgccccgcccgccctgtgtccacggggaagccaggctggttacctcctcacttcagtgggcaggcgggttgacctcacacaccagggcttctttcctctcccgcttgctgccccaggcagcagggagggtcccaggctggccacgaggctccttcatctttcatccaggcagggaaagaggaccttctgccaacaagaagttccttctgggtctccagcagagggcgctccagtcatcccgtgtcatacacggggtctctatccacaatctcccagtccctgggtccaaagtgccccaccccaccaactaatccaggtgaagaccgccctgactccacacccccagaggtctcaggactaccccccccccgttcctgctgactctccccctacccacccaccctccctagtaggaatcacgcccaacctacccggtacgccccagaccaacctcttctccatccctacactacatctcacagggctgctgggaacagttggtgcgttgcacaagggcaccttgcccaaggagactccacacacatcctagatttgtgtatttattacagttgtctgcatttcaaggaagggacactatcttcctattcgcacaaagatgtcacggggggctaacaagggacctgtaaattcaggctccattcacaaggacggtcttgccttcttcgcatctctgggtctcctggggaccagtgggagggtgacctggctgtaactggaatacccaatccagctcccgttctcattccccccacccccaccgcactgctgcggggcgtggggaagagagaagcccaggaagtcctcaaggcctgcagtccccgggccctgccggccccaggcgctccggaaagcggtactgtatctcgccaaggcctgtctgagcactaagtgcatttacaaagctctgagaatgttttttttatactaaaattgaccattatattctactgtgagaagtgcagtctgtctgcactatattgttttaaaaacgaagagaaagaaaaaaaacggaaaacagatggtgtctcagctgtgggtttgctgtaaggctgttctctctctctccctggcttcccccacctcagggatccacgggagggcaccccaaggagccctgtggggacagagtggggtggcatgcagggtgagctatgcccaacttattacaaagctcttcaagataaatgctatcccgtgtctatgtgtcaggcccgtggtccatccataggggcaaaatcaatcctgagcccaagccctggtggctcttttcggtgctgaggtggctctgaaaactccccattggaagtccatctctagatcctgttgtcatcctcccagattaaatggttgccatgtagctgagaacaggctagccatcgccctggccggcatggattatgcaggctgacacctggcatatacccataccctgccagtcctgttattggaacttgtcattcactagggaccagtcatacctcctaaagactcacaacgcccttgtaaggtaggaagtcagcctgaggttacgctccagtgggccaggtacccccaagaagaaagccgagaggactacctgtcctgccacctgtgggggtcagggcacacctgtcctgccacctgcaggggtcagagggcccagcaggatggcagcctggaagagggggtcccctccccagcacgagggcttccttgtaccctgaactccgcccatgcttccttctccccagctcctccccagtccaagagcctggcgggacctctgtgctgggaaaagtcggaatctccaatctgaggcaactcccctgccccacacagaaccctggccagagacagaacactgctcactccagccaggactcccaagtcagtcaggccctcggctggggccacagactcctgaagccttgtagccacccatggtctgttcagaagtggagactcagcacccatgtgtgggcaggaccaagcttttctgtgggacgttcatgagcctgggctaccctgtggggtatgggagacccgggtgaagtcatagtagaggatcagcaggtgacatagtgaccttggccctatcaagtgagggataagatcagactcatatttcccagagcggacacaggacccaaggaaaataatggcaccaccacactgcctaaaaccaaagccagtgggacactcagagccacagcaggcaaagcaggcagacagacagggtctgaggccccatggctacaccgagctgccctgaagtatgcgtttctcgactgcagtcaaaaccagggcgtcagtggcaccgggagtggtgctagggggcagaccaccctgctatctgcagcggtgtgtgtgtgtgtgtgtgtgtgtgtgtgtgtgtgtgtgtgagttcagagcaatctgtcctgtggctgggttcctatttcctgggcctcagtttcccctctgggagccgagatggatgacctgaagaacattctagatgccatggcggcacgcaccatgaccctggtcacaagggtcatgatcagacaggacagcctcgggacacataaggtcaccaacatggtagaaggcgacccacccacagtcaaaggctcagagcgctctgcacaggtgaagcgctgcagctgccaaagccctcccatgccctccgcactcctagctgctctgtgtgtggcgggaggcaacacacaggctgcgggttgtatttgccttcagaactaagggctggccagcatggttggggctggatgctgggcagccagacggtctcctccaccctcctaccgcagctgtggctatctctgttctacacgccaagagctctctccctggagctatcttgggcttccatgtctccaggctgagcaggtaggcaggcacttgatactacatccatagctatatcagtagagccaccaaggggcgacttctgcatcttaccagatcaggacagccagagtctgagaaccaccgggacgaacaccagctcaaagaacagagaccttaggctccacccccagcccctgcccaaaacaagaaactgcaccctagagacacagaccacactggcatactaaaggctctgacgagtccctagcttagcccactattctgtcaacatctgaacttaagggttttgttttgttttctattaaagtcccagggaatggagggctcaggagacccctctgtgctgcagtagaggaaggagtaccttactcctgggcctcggtttccccagttgtaacacagtataatgtgctgtggtggaggaaagatttgaatccaacagtggtcaggagtctcgacctcgtctaactttgccgcatcctatcaggaagggaggacagtgcggcaggatgacccctctgaacgcccatccatttgaggcgggagggagctcactgcatagcctggccttgaaactcatccttcctgagaggccaagtcctgagatcacaggtatgtcctagcacacccaggtgaaaacgattttgaagagaaacccgaggcccagggagggaagacagcttgcctgttgatcgcaaggaatttgatcctaaaccatccagaaacgaggccaccttctcacagaacacaggctgctcccaagtccagggttccaagtgtcccttaggccttttctgagaggccccaggtatgaccacagctgaccccaattatggccacctgggaaagttagtgcacctgttgctgataaatttcgacaccttcatagacgcacgagagtctaaattaaaaaaattaaaaatccgggctggtgagatggctcagtgggtaagagcacccgactgctcttccgaaggtcaggagttcaaatcccagcaaccacatggtggctcacaaccatctttaacaagatctgactccctcttctggggtgtctgaggacagctacagtgtacttataataaataaataaataaatctttaaaaaaaaaaattaaaatccttgtggggctcagtatggcacttgcttacaagctctgggtcgcccaccaccaccaccaccaaactcccaagaagctactagaagtgaacctggtaataagacaggaatcaggtttgagtcctgcctctgccacattctcactgtgtaccctggagtggtttccattatttggtctcaccgctttctctgtaaaatggagttaaggccccgtgcttcctacctatatggtgagtgacagacaccttggcttcactcactaagatcagaaaatgcatcctctcaaatcatgagacatcttaaggggagggtagcccaagggttagctgagtcataaggggctcagtggtgtcatgggggggcggggcttatacgcttttagtcatcgtcttagtctctattctgttgctgcgaggagacaccatgaccacagcattataaaggagagcatttaactgggaggctggcttacagtttcagaggctttgtccattatcatcatgacagggagcatggtgctggagaaatagtggagagctacgtcctgatccgcaggcagagaaagagcaagactgcgcctgacataggctctagaaaccccagagcccaccagccagtgatacacttcctccaacaaggccacacccactcaagcaaggccatacctactctaatgaggccacacccaacctagcaaggccacactccaaacaagaccacgcccactctaacaaggccgtacctactctagtgagggcacatccccaagcaagcccatgtctactctaacaaggccacactgctcccagcctggcctagccacacacacccttagctctgcagtccctagggtgtgagtctcccctggccacagctctcccatcttcttacctcccacctatccatttgtgagatccccagacctcattgcccccaggagggttaggaggtacctagctctcaaggacatgctttgggggaccagggtagagataaaggcacagaaggtaacttgacggctcacccacaggagccacagacacggcatggaggtcacattattcgctttaaacggtggtgacgaccctgagaggtaacttcatttgataccccggagctctggcgaagcgtctcttgaccaaacccctctgctttggtggccaatgtatccattattttccagaaatctttaaaccttgggggatagtgttcgtcacacgtactgcacgcatgcgcaccccgaatgactccctccaggaaagaagacagaggtccctgaaaggaaagggctccaagagagcaccgggagccacaggggtgggatcccccgagtggcagctgatagggtccccgtgcagaagcaacctggggaggcagaggccatgagcacacagtgctgggttcaaatgtcaccttcaccgctggtggccctggcgagggtcctggcatctaggatgctattgagtcctggttccgggcttggctgggttctgtaaccagtaactgtagctgactgcaccatttaaaacaaaacaaaacaaggggctaaagagatggctcagtgcttaagagcacgggctgccctttcagaggatgtgggttcgattcccgcatccacgcgcctcaccaccatctgtaactcctgttgcagaccctcttctggcccccatgagcactgtagggacaacgataaaaataaacccctttttaaaaaagagaaaactcagcagtatctaaactcgctcattccgcaggcatctgtggggtttttatttttatttttttttttggtgagcgctgcaaagccccgggccacgtgactgttcatcagcctgtcactcatccttgccttaaggcgggccaggaagataccaacccccattggccaacacacatcacatggttaagctcaggtgttggaaattatgctctgctcagtaagcaagctgcatggactagcagtgcggcgtgatgtcacacacctgctctacctgcacgtgggaggtggaggcaggattgagagttcaaggccagccccggatacggggcagaaataaaatataaaaataaaggaagaggctgtggtgcaacctagcacacgtggtacaggctaactttcccgtggtggtggaggtggctggtcctgccttgggggatgtggtagagttttgactctagccaaaaaccaggtctgactaatgagagagcattctgcttccctggctctcagagagttggggagtggtcctgagctgcccagtaagagccagtcctgggtggatcaagttgccaacctcgtgggccagtacctgggaaatcctgactggggcaaaccccacacataatcagcggctgctgaggcacagaagaaactgaagctgcctggatccagccatacctgaagctagaaccgcgtggtcattttcagccatatgggccattctatgcgctgggaagctgagttagggcgctggtttgccagcccgagctacagaacaagtttgaagctgatccagtcagcccagcaggactcaaatcaccaattcatactcatacatcttgtcacatacaacggagaaagtttgtttactaacttgggggaagtattagaggctacctaccagattaggctagagatatggctcaacgttacctccaaggctgatggtctgagttcaatccccagtatccacatagtaaaggggggaactgattgccttctgacgtcatggtatgtgtgtcccacccctcaccccacccccacacacaaaataattttatttaaaaagaagggctggagagatggctcagcgatcctagatcctagattcacaacacgaagtcagcttgtgcagtctgttaactccagttccaagggatatgcgccctctcctggcctctgcaggaactgcatgctcatggtaacagacgtgaaggcaacacacccgtacataaatatatatatactaaggatgccaactttataagactccccgaaagatttaaatggagtgacacagaatcccaaaggggtctgttagcaaaggtgggattgtactacctacgagaaaccctagagacccctgcagagagggcactggaaccctggagacgcaagagtacacgaaactggggtgtccacacaggcttgctcctgagcaaacacccctgcgctttgttccaagcacggaaagggtggggtgtggcttgatggcagagggcttgcttgaaaccctagattccaccccagcacctcaacactagaaagcggcatgagcctccggctgggaacaacagatctacataaactatgatttatggattatgacgtcgctttgtgtcgttgtgacgtcactgcccaaccgtgtcatcgcaggccgtcgttgtttgtgtattccaagtgaaacacctaattctcagagcgacgcacgcaatccgcagagggtgggagctttggctctctcgttttcaccccgcaaaaagtgtcccacagatcactagcttaaggggggaaaaaggcgaaattaacagaatagccccaaccctggcggatcactttcacaccattgtggaaatccgaaaattttaagcagaatcatcccaagttgggggactgtgctcaggcaaacgggcatttgtaagctgtgggaccaggtgtggtgtctgtcatgttctaaaccttaggacgcttcagtctggcaggcacggaccccgggatccagttcagggacagcatgggagaatccttggctgctggagggaggggctgaaggaaccagggtgcttcagctgggagaagggagggtgctcatcaagggtgggctgtaaaactttgctgggtgtttttttctgtttatacagggtctcatgcagcccagggttgccttgaactcattataaaaacttgaaccttttttgattgtctcactatgcagaccaggttggcctcgaactcacagagctccgtcagaccctgcctctgaggcttgtgccaccatgcctggctaaaggaaaaaaagaaaaagaaaaaagaagctgggcagtggtggcatatgcctttaatcccagcacttgggaggcagaggcaggtggagttctgagttcgaggccagcctggtctacagaatgagttccaggacagtcagagctatacagagaaactctgtctcaaaaaaagtcctttaaagtctcctaaatgaaacatagcctttcttggtggcattgctgaaggtcctctgggggagggataggaccatagcatatactgcagcctctctggtcagagagctatgctgctttgatccactaggggtcactatctccctgttgccctctcccacttaggtcgattactgcttcctgtccgctgataggctgaagtgtaagacacaatcttggccaatatttcgagaacacaggctaggctgacggggtctgcgggtgggagacggaggaagaggcatcccattctgtcctctggaggcacctggatctgggcatgttgtgtgcctgctggaagccagtggggtgtgggaatgcctgcacaccctggagggcctcacctggttaaatgaatcagaaccctggaattctctgcatcagtgccctgatttgagatttcctgacatctgggatgatggacactaagtcttttgtggacggtctatctgaaccacgtgaatgtatatggccactacagccatggttctctttggggaatcctgaggtgttactgtatttcatttcctttagtggccagattatattccatcatacagacatacctctttatctgttcagccctaagccagggaaacggaggccttgaccatgccccaaggactctgaaaattctggaggcaaggctagagcccagttctctgccttctggaactttctcccacatattcttcactgttccaaatcggggtgagggcacccaagatggacagggcccctccctgtgtctccagcacccaccttcagggaatagccaggggccaccttgtcttctggtcacccaaagagagagcccagagcctggcttaagtacgcaggtgtttccacgtcagccagagtcaaggaaggatgacagtgactcctgctgagaacgctgagtgggctgccctttggctgcctctctgggagtgtgtgtggacagtggccaaaggacaccctggggagcctgggctgttagcccccgggtgcctacaggcagaggggagtggggtcctcaggatggcgaagtcctggcttcctccccacacagcggctatcactggtttcctgccaccgtctatccttctgacaaggacagagaggctcagaggggtaagaggccacatgccagttcccgtgacaagccaccatggccaatgcttaggaagagggggaaagccagtctgtgtgaggccctgggttctgtccactgcagctgcctctcagacatcagtgctccctgtggctgcttaggagaggatgggaggcactcgcctgagctgggggggggggggtcacaggggacatcggccagctacagactcctctgtagacaggctgcaggtgtacagggacctctccttgcgccaagagagcagagtgtcccaccagcactgcccaatgcttctgtgtcaccagcatcactgtgcctatcagtgtcccttgtccctgaccagcactgtgactccacagagtcacacttctctctgcctcccacagcactactccatccttacccccctcacaaacaccaccttcaccagcatcccaccctccaccagcatcccaccctctacccccatcagttctgctactttccacccggaccacaccctctacctccaccactttcaccgtgaccacgcccacctccagccttttctctgctgcccacactcgggtgctcattcacagaattgtacaggtgtcccagggc

SEQ ID NO: 898 - DNA, 1801 bp, Mus musculus
gcagcgggcagcattgccgggccggcagctctgcgaagaggctgcgcgcgccggccaggccgggcgaagagccgggcccgaggctaggtgagggtgctgggcagcgcgaggttgcggctccgggagccccgcgaaccgtcccgggccacgggcacgggagagacctgtgcgccgaccgctgctgcggcgctcgagcaccataccgggtgcacggctctccatccccgagtctgccctgcgcctgctggatctgctggtcctcagcgccaaggcccgcgaggctacatcccagtctctgccgctcgctgcggctgccactgccgctgctcgccggcttcccctccccccacacccggagctcggagcaggaggaggaggggccggctcgttctcggcgctgctctctgcaacctgcgggggccggtgcacgccgggcgaggagcccgggccgctgcagaggactcagaacccaccaggccaacacctggcctgtccaagcaagagcctggatctgcgcaagtgtgagtcagtggccagctctatgcattcctcgcgctaccctagcccagcggagctggatgcctacgcggagaaggtagccaacagtcccctgtccatcaagatcttccccaccaacatccgagtgccgcagcacaagcacctgagccgcacggtcaatggctacgacaccagcggccagcgttacagcccctaccctcagcacaccgccggctaccagggccttctggccatcgtcaaggccgccgtctcctcgagtgctcatgcgcccgccggccaccccaaaagcgtgctcaagagtgtggagggcaagcggactaaactgtcgccggccaccgtgcaggtgggcattgcgccttacccagtgcccagcaccctggggcccttggcctacccgaagccacccgaggcacctgcaccaccgcccagcctgcctgcagcagccactgccacctctgtgatccctctgcccggccggggccttcccctccccccctccaacctaccctctatccatagcatcctgtaccagctcaaccagcaatgccaggccccgggtgctgcaccaagcgcctgtcagggcgtggctgtgccccaccccagtccagctaagcatggcccagtccccagctttcccaacctggcttactcggccacagccggtctgccagactgccggaagggcacagaactgagccagggagccaccccagccctgacactggctggggccaccaaacctgcagggtatgcagaaggtggcctggattacctgctgtggccacagaagccacccccacccccaccccagccgctgcgggcctacagtagcagcaccgtagccggcaagtcccagtccccagagatttgtggcgggagggccttcgaaagggccaacgggtcgccccacaactgcggaatggggctgcccggcagcttcaccgtgggccagtacttcgctgccccttggaacagtgttctggtgacacctaccagtgactgctacaatccagcagctgctgccgtagtgacagagctggcaccaggagccgcccgggagctagccgggcctcctggagacgtactctcgggcctgaccagcaagagtgtgtgtaacacagcggtgctgagcagcagcctccagtcgctggagtatctcatcaacgacatccggccaccctgcatcaaagaacagatgctgggtaagggttacgagacggtggccgtgccccggctgctggaccaccagcacgcccacatccgcctacctgtctacagataa

SEQ ID NO: 899 - protein, 567 aa, Mus musculus
GCWARCGSGSPANRPGPRARERPVRRPLLRRSSTIPGARLSIPESALRLLDLLVLSAKAREATSQSLPLAAAATAAARRLPLPPHPELGAGGGGAGSFSALLSATCGGRCTPGEEPGPLQRTQNPPGQHLACPSKSLDLRKCESVASSMHSSRYPSPAELDAYAEKVANSPLSIKIFPTNIRVPQHKHLSRTVNGYDTSGQRYSPYPQHTAGYQGLLAIVKAAVSSSAHAPAGHPKSVLKSVEGKRTKLSPATVQVGIAPYPVPSTLGPLAYPKPPEAPAPPPSLPAAATATSVIPLPGRGLPLPPSNLPSIHSILYQLNQQCQAPGAAPSACQGVAVPHPSPAKHGPVPSFPNLAYSATAGLPDCRKGTELSQGATPALTLAGATKPAGYAEGGLDYLLWPQKPPPPPPQPLRAYSSSTVAGKSQSPEICGGRAFERANGSPHNCGMGLPGSFTVGQYFAAPWNSVLVTPTSDCYNPAAAAVVTELAPGAARELAGPPGDVLSGLTSKSVCNTAVLSSSLQSLEYLINDIRPPCIKEQMLGKGYETVAVPRLLDHQHAHIRLPVYR

SEQ ID NO: 900 - DNA, 76433 bp, Homo sapiens
accccaggatactgttggctcactgagtcttccccagtgtcctcccatcacctctcaaatagccactccccagggccaggcacagcggctcatgcctgtaatcccagtactttgggaggctaaggcgggcagatcacctgaggtcaggagttcaagaccagcctggacaaactagtgaaaccctgtctctactaaaaatacaaaaattaactgtgcatggtggcaggcgcctgtaatctcagctactcgggaggctgaggcaggagaattacttgaacctgggaggtgaaggttacagtgagccaagatcatgccattgcactccagcctgggcaacaaagtgagactccctctgaaaaaataaataaataaataaataagccactccccaatcacaggtccctttggtcaaataccatgatactcaatgtataagacagccaaaagcagagggctctggctggtaggtgtgggttaggggagttcaaacttgtgcccaaccctcactccttcgctctcattagcccccagggtggagtcttcccagaaacttccagaaagaaactgtcccagggaccaggaaggctgagtttgagtttgatgagcagccactggctcactgtggcaaatctcttcccctctctgagcctcagtttccccagtgatgacatgagaggattgaaccagaagttttcaaatctttattgttgaaactgtaaaaacgctgaaccccaatttgaaaaggggttcagaccccaatttgaaacgggatttatccccctgtcttcatgccaccccatgccaggtcagagggggcctagccatctctccagaagagttcaactttgttcaacaagcacatattgagctcttgttgtatacctgggctctgtgccaagccttgaccatacaaagatgaaaaagaccaggtccttgacttcagattgaaattgaacatgccctagttgaagttggcagtgcagggactggagtgcagattccagagctttatcttttccaccacctccgcccacccctttcaccaactagaggtccctgaggcatcttcctaaaaccctaaggctcctagaaatgttttgaaagtaccagattagacttttttcaagcattttattatgaaaaaattcaaacatacagcaaagttgaaagacatttacaatgaacactttaatatccaccacctggtgtctaccattaatattttactgtagttgctttatccaataagggcaccctcccagccctgcaagatttcatgactcagagagggctatagtgaggagtttgagttctttttgggaaaccctatgaatctgtgatggcaacaccagcggctgcaacagacacaggcatttaagcagtatatatcatgcagcagtttcaaagcttatggcattgatcaacaggtgggcaactttcatccacaagtgattcagggatccaagctccatccatcttttagccctgccctgcctaggaagagtcgatcttctgcctcggggcacaagagaaagttggtggaaaaggggcacaatcacacaatcactttttttttttttttttggacgctgggtcttgctctgttgattagcctggagtgcagtggcacaatcttggctcactgcagcctccacttcctgggctcaagcaatcctcctgcctcagcctccagagtagctgggacttcaggtgcgcaccaccacgcctgactaatttttgtatttttttgtagacacagggtttcaccatgttgcccaggcttgtctcaaactcctgggctcaagtgatcctcctgcctcagcctcccaaactgctgggataacaggtgtgagccaccgcgcccggcctcacaaccaattcttatatcacacttgctcacagttcatacacagatgatagtatgcatgtatgtatcatacatagatacatagttcattaatacagagatgaaaaagaccaggtccctgactttagagccttccaataagtgaaacagacgtttatttcctcttagctgtcccttttctgagagaaagcccatcagattttccattttgcaagggtgggtggatctgacattggaacactggaggaaggatttgattcaataaatctttactgggcactttccatgtgcccagcatattcatgtggttgaactcattgagttttttccttcactgttgcaagagcattttccccattttatatgagagaatgttgagattcaaaaaataagcatatatatatatatatcttggaatggatgccaaggctcagagtggtgaagtaacttgcctaaggtcacacagctagtgatggagctggaattgaacccaaatatcacttcctagttccttgcttttttctgcatcatcagggtgtctgctggaatcagggtgaagacatacagagggtaggtttcctgacaaaagccattcctcaggcccaagctagggtctccatatgcatctcttcatcttctcctcccttacactccatgaggttggtgccgtcattcttgccttttcagaaaatgggaagctgaggatcagagaggtgaagcaacttacccgaggtcacacagccagtttggtttcatatttcaacctatttgacctggggcacatcttgatgtatcactggtttttatgctgaacataaaggcagcaggattgttccttgtcacaaagatggtttaaaaggcaatgagacaacactggctccactaacaatggcgagaacatattttaaggccatggagtggcatctctgagcgataatggtttacagaacaactccaggcaatttagtagatcccctaactcctggatcccagccagaaaggggctctgtggcaagggcagccagaaagggagctctgtggagctccctgggtctgagcccaggtctggggctgcgggagggagcccagtgcagctgggcaagaagttgggacccagcctatcgaagacgaagggcccaatcaatgctatctccccgggccatgcctggccagacattgatttctactgctgttgttaactccctgtttatgtaacgcctgaactttgcacaactgaaccgtttaatgtgcagaagagggcctgttgccatgaaaaccaggctgctcatggcagctgggatgcagcggtatccctgttttattggcctgagctgaatgtattttaaccttgataagtcaataactttttgtacaaaaggaaatctgccaggagggcttaggaggacctgggagagcctgctggcctttccaggttggagaggaggcggggctggctgggtttaatcccctggaaatatccctgccactcacagcctgggagaaccatgcccagctggccagaggacagagagaaccttggagggggatggtggggaccacccatgcctccaatcactatttcctgtctggtaaggactgcagctaagtcagacacccactatggcaaagaaaccgaccagggttcaaatattggctccacacactcgggagctctgtgtgaccttcagcaaggccagtgaccccagcctcagaatcagcatctctaacacaagccatcagttcctcttcacgggcgtgttgcaaagttaacagatcatgtatgcaaagcacctggggtaactcctggtcaacaatggggccttcatagattattgttgttgatatattttacaataataatcattgattatatttgtagaacacattaggctccaggaaatgttatatccattttctcattacacgcctggctaatttttatagttttagtagagacagggttttgccatgttggccaggctggtctagaactcctggcctcaagtgatctgcctgctcggcctcccaaagtgctgggattacaggcatgagccactgcgcccatccatcattacactccttgatttaggcagggctgggctagatagccccactttttagataaggacactgaggcccagggaggttggctctcttatctgaggggtcacatgatgagatggtggtgccgactgaaggaaccaagtctcttgactcccagcttagtgctctttcaaactcaaaaccacaaacacagaaatagcctccatgctatcaggaatagcccaacatccagccccagactcatggcagacatcattaatccacggcagcaccgcaatctttcccttctgagcctgggcgagacctcagaatcctcctcaacacagagcaggtgtttgagatgagactcatgtggaaccagatgccctgaaagggctctgggttcaagttccacccctggcccaaacttgcatgactttgggcaagtgccctcccctctctgggcctcctggtccccagtggtgaaacaagggggacgtttaatggttattgattctgagggggtctcccaggtggaagggaccccctaccacctcctggttcctatcccaactcccctgcaaccaatccctctgaaccttcttcaactccatccacaaataatgacctagatcctactatgtgccagtgactatgcaaggtgctggggacacagcggtgaagaaatgacagtctctcccctcccagagctaagtctagagaggtaaacagaaaataaacgtcatccaggccgggcgcggtggctcatgcctgtaatcccagcactctgggaggccgaggcgggtggatcacttgaggtcaggagttcaagaccagcctggccaacatagtgaaaccccgtctctactggaaaaacaagaaaatacaaaaattagccaggtgtggtggcacgtgcctgtaattccagctactcgggaggctgaggcaggagaatcgcttgaacctgggaggcataagttgcagtgagccaagatcacaccactgcactccagcctgtgcaacgagtctgtctcaaaaaaaaaaaaaaaaaataagaagaaaataaatgtcatcctgcaagtgctcagaaagctgccaacagcagtaagcactgacgagagggaaagcaaaacaaaagggaggtgttctggggaaaataacttcagatcgggtagtcagggagggcttccccgaggaggtgacatttaagctgagactggaagtatgagaacaaaccagagagcaaaaggaagaatgttccaggcagaaggaacggcttgggtcaaggccttgaggtgggaaatagtttggcaccttcaagtaaccaagaggagactaaagtggccagaagggagtgagggtgggatatagtcagggagatgggcagggttcggttcctgaggccacttggacttcttcagccctacacatagctcaccccctcctccttgccccactaggcctgccccagagagagactcaggtactggggggcggggctgggtgaataacaaggttacatgtgtttcttctttccccgtttctccaggaggagcataaagagctctttcttttctgcttattaatagctctgattaaattatctctgaaaaacctacgtggcgtgcaccaatgggggctgggctccctccgggctctggcctagatcacagcaatgagggcaggtgaggcaactgggggtggggtgggaggctggagcaggcctgccccctctgcctgcataaatgccccgtctctgcctgctcccctctccccagccccagctcagcctctcacccacctctgcttttggggcgttcacatctccctcacttggaacactaggcctttgcattggttgttccctcttccgggggcgctcttccctcacctctgcccttggctacctcctacccatttttcccagggtagctgacttgcctttttaccatcactggccctccgctgagtcaggtgcctgcttcggactgtcccctctactggtaccctggatgacacctgttagttgccttctctgtgccccatgaaacctgagttccaagaggcctatgtcttggtctgagtcactgctgaattcccagtgtcaagcacagggcaggtacttagaaaatgttgaatgaatgagggaattagcagacttaaagggggaatgctcaggcttcagtgcgtgagaccagagaagggcaaggcaaagatggaccaggtggctcacgtctgtaatccgagtacttttggaggccgaggtgggaggatcacttgagcccaggagtttgagaccatcctgggcaaaatagcaaaagcccgtctcttcaacaaatttaaaaattagttgggcatgggggcatgcaccttgtagtcctagctactcaggaagctaaagtgggaggatcacttgagcccaggagttcaaggttgcagtgaactatgatggtgccactgcactccagcctggtgacagagtgagactttgtctctaaaaaacaaaaaaacaaaaaaacagagaagagcaagactagccttacatacgtgggagggtgggaacaaaagttccagcctccaggccccttgagtgatgccttgattaattgaaatggcaattaatcccatttcaaagatgggggaaactgaggcacagagcggctgagtcatatggctagtagcccagtcagcctgactctactcccttctcttaattctcctcctctacgtgaaaacaaaacaaaacaaaaacttgggccacattcattcagtgattcagagattaagtcaacagaccttcattgagtgctgactctatgtcaggcctgtgctagggaataaaatgaactgaatgcagcctttgccctggaaaagccctcaggccagtgggaagcctgacaaagaagtgggccattataacacacactggacacatctgtgaagggggaagtgctccagcctggagcagggtagtcagggaaggcttcctggaggaggcagcactttggctgaactctgaaggaggagcaagagttagctacctggagggagggcattctaggtagaaggaacagcataagcaatgacctggaggtgagagaggcacgtgcaaggatttgtaggtatttcagcaaggttggtgtgtgggaggcaaacaagaacagtgagagatgagatgccctctgccccctgccccctcagggcctgtcggacccctggccagagccagtgttccggggctggcctgcctggtggttttatggaccgtggcaaatccatcttgacactgtctccaatcacataatgcagttattggagtcgaccaagagcaaaggcacgagggtctgatctcagggagatgggcatatggggtaggggggcactgggagtgtggggagtggggcagagcatcttacggggcattcacctgcctggaggggagcgacaggcatctggaaggctctgacctctcctgctggacagctgccttggagcctgctgctgtcggaaattccaccatgagcacatcgtggactcatagaacttcagagatggaggggtcttttgagatcttctcgacctggggttgtcagccctggctgtatcaggaaccacataggagctttggaaactgctgtcccaccaaggagagtctgattggtagggctggggtttgggtcctaccctccatttcatggcaggggaaactgaggtccagagaagagaagaaactcccctcaaggttgcacacggtcagacagtggctgccacaaggtgcaataaatcaacgtcagggctctggactttggttctgtcatttgtgtgaccttgggtaagtcatgtggccttcctctgctgtaggatgtgcatagtgatcgtatataccttatagggtttctgcgagggtaaaaggagttatgtgagataaatagcagtgagcccatgcctgacacacagtaggtgtgaagtcatggtgacctacaatgaaaaaaatcccaaacttttgacaggctgtggtgcgaactgctgccttcttctcctcttcgcgatctctctcatttcccagggtttgcttgttactgtccctcgccctgtcctcagctgaagtctggtctccccacctgtccacacgctgggtccacccatccagtcgccccggccgccctccctgacgtccccgcagccctggctgctggcccgagcgggaagcagctggaggcataacacatttccaggtaaatccccacccccaccttcagcctggggagggaaggggaggagatgggggcggccgcggagaaatagagcggagctgctgggaacagcgcgccgagcagccgcttagaggcctgaaacagggccagctcctgtcctagataaggcggcgggtgacccacttgggccggccctggaggtccgccgcgggcgcctctcccggcggggtgggttggctcctggaagtaggctagggcccgtctataatcagcccgtccgctggatacgctccccagggtctccaaagccctccagcccgggtgagtacagagggcatttattgagcacttaatgtgtgttttgagtcctttacatgcaagaattcattttgccctcaaatctacgctgtaaggtaggaattatgatgccccccatttcacagacaagaaactgaggcgcagacccgtgaaggtaaatggccaagaccaacaaccagcaagggcagggctgcaatcccacccagtttcggtgggactccaggtatcacacgggcatagcctgaggggtggggggtctgactgctgctctgcatttctgtggggatctttgttattatcccggaaagctggcttcctacagtgctgtgtgatggacacacagcaactgagggaactgccccacccaggactcaatttccccatctgtaaatgagactgctagacgggccgcccatgggctgtgagaacccaggaagcttctttaaaagtaaaagggaaagcacagtatagtttgatagattcatatttgaaccccaggttgatgtgaaactatgcctcagtttccctatctattaagtgggggagtaggctagtgcctgtctcctgtgggcgtggggtacgtctagaaggtgtagcttgcaaattgctcagcgctgtgctgggttatatagttagcgctccacagatcacaactgtgatgccaaaaacacatcgctgccaaaaataagccttaggacaaaaacatccaggaccatgtcacttcacatctccttacctcagtttcctctgtaagttggaagtataataatagtacctaccgtatcagttttctcatctgtaaaatgggggtgatagtaatacccactcacacggtgttgtgaggattagataaaatactttgctacataagtgttagctatagttgttatttttaacaaattcctcatgaggttggtttttgccaagattaaatgaaataatgccgataatgcacttatacagtgccttgtcccaaatatgtgatcagtaaatgacactggttttgccacccctagtgggactacaaaaaccagcacgccctgcgcccccagtcggggcccctccacccggcgccggcgcgcagcatgccgggagttgcagtcctcgcgaggcaagttccgcctcgtccctgcttgggggaggaggttggagagccgccctgccggcctttgaattttgccgcgaaaagcgcgcgtggcggcccccggctccgcccctcgcaggacgcggtgccgcgtcaccctggtaaccgcctctcagccgccgctgattgggctgggccgcggggggcgggcgggggacgagacgcgggggctgctgccggcgctcgcgcctgtcagtcgggccagagccgagcagcgggcaggactgcctggccggctgctccgcggagaggctgcgcgcgccggccgggggaggcggacagccgggcccggcgcctgtggggcgcggcgcgcggcacccgggcctgagaccaggcgaggcgccggcgcgcgccagacggcgcgaggctgcggccccgggagcccccgcgcgccgcccggggccatgggcgcgtgagagcccagcgcgcgcggcccctgctgcggcttgcgagctcgcacacccggtgcacagtcccccgggccgtcctcgtgtccgtcctgcgccactgggatcggctgtttctcagcgccgaggcccccgaggctgcatccgagcttgcgtcgcccgctgccgccgccgccgccgctgttcgccggcttcccctccccccacacccggggctcagagcaggaggaggaggggccggtgcattctcgccgctgttctttgcaacctgcaggggccggtgtatgtccggcgaggagccggggccgctgcgggtgcgtgcaacccccgaaggagacaatccctccacctcggggcgaactcgggggctgcaagccgcgggcgggcgggcgagcgagaggaagcaacaaagacaggctgcagctggggctggcgaaaggggccgcggccgccgggctcccagcgcgggcggagagggcgccctgggagcggcgcgggccgagctgcagccttgagcggggccccgaggggaggcgcagcgccgcccgccggacgtggcgatcacgggccccggcgaagatgcgtcgcctgagcgcccgcgcggcccccgtccggggcgggcgtgacccctgctgaacggagacctcccctcccccccgacttcggacggcgcaggccggcgccaggatagccctcaccgacagcgccccttcccacccggagagaggcatcgacccccaaggagggcttcctcaggcagcctctgccactcctgcatggctgcgacccgtcgagcggagcgtcgtggtagctgagacctggtgcccttcgacggcctggctgatccggtgagttgtgcggggcggggttctgcgctggagctgggggcaccccctggcgtccgggcagccaggattggacagaaggggtcctaggctgttgggggtcctgaagcagagataacccttgtccgcccctttcctccctccaaacacaacttgttcagatgggccagccgatgggagtggaggttggggggcccattcggattccgcgggaccctgggcgggttggttgccagagaggaaaggtcaccccacccgtaaagctaacaaaggtattggctgtgtcatccgaaaattccccgggaactccagtgtcttggaagggctggggggtggggggcacccaggatgggaaaacgttgagggtctcccgagcagcctctgagatcttcaagggaaatcacctcagagggggatttggggttccagaaacgcaggtggccacgtttgagaattgtgccccatggggctagaccttagagccctcgttcaaaccacgttcccacaaataactcgcagggacggtaggttccccagtgggggcacgacatgacgtcaaaccttagcctctgatgtcactggggttgccgtggcaacaccacttgccttgacccaaggccggagggggcggggtcgtggtaacaaggggcggggctggatgcctttgggtagtggaggggtgaaggcggactccccccacccctaccattgcagtcctctgacctaaatccttagcgccccataaggtgggggagggaggcagtgccagctgtccctgttgatgctcctccccgcaaggacaggtgttcagagctttgcccatgtagcctggcctgtgcctcggggctcaggcctcccagacagagcaactttctgttttgaaaagagatgctatagaagagacctccctgaaccccaccatgtacccagctggcaggctgaagttcccagggtccccagagagatgtgggcctccggccctccaataggctacttctgctggggaaaatgtgggtgcccctcccccagccaaggaaggtgcagaggagctgctgcctgctgcacccctagtccaggggctccccatgctgttctaccccaaggtcaggggccttggccaacctggaactcctgattgccccctgctccttctggtgtttaagaggatttcaacgagcatattgtgaggctgcttaagtgaatggcgggcaagtgaggcccatcagtgccaaggtctgaataaactgtgtctctgtcagggcacccccaaccaacacacaccccagtactggcacgcttccctgcaaaggcccagagaacccccagcaagcatcctgctgctggctctgggattcgtctaggtcccttccagcaattattgccagtgtcgggtgctggtgaaactgctgtgatcacatttctaggaaaaggttcgaaaactgtcattgcctcagcagcgtggggcggggtaagagcagagaaagtgtgtgttcgggtcattaggagaagccaggccccagtctatgcagcgagcattttccctgctcttctaccaagctctctagctagattaacaggtcaataaatatcggtggagctgcttttgggggcttggcagggagatggtatttccagctgaaatggtgtcgttaaacacacaagcttccaaggacagaggagcaacagcagattgggggagagccgggagaggtgggcagaagggctgtttgcgctgcctctcgaagcttcccagtttagaaacaaactcggagtgcgcgccagagattcacaaacacaggcagttggaggccctctgccgagtatttacacttccacagccaaggcagagggaaaggctgtcagaattgggcaattccttctgttcccttccctcatctccctgggcttggcactcagcgtgccagacgatgagcaggagggagtgccagctttctcagcatctccctatatgccaggcgttttacatgatctcagttactccttggagtggctcatacgctgtggcccattttatagctaatgaaactgaggcttaaacagaggaagtgatgggctacaggtgatcagccaggcagctgcagaggttcggtcctgaattgccctcctggctccagagtccttgtgtcttaccacctcctcccatggggtttgggggacactcctacttattggacaggggtccctgcaggcatcagaggctatcagccatggagggggagtctggccccaccaagatgctttgtccacaccaaaaggcagatttgaatcctctcttcctatgacctacaggtcagcgttgagtagattaacaacttccgcccggccttgtggtctgtctggtcccctcacccccaggactcctttctccagcactaggggaaagaaggtgtagcttgaaactcgctccttgtcacctgcccttctgggcttgcttggagggaggcggtgaagctgcccctggccgccccagggaccttcttgggatgtagatggagcaagggcaaactagtagatgaggttcctgacccagcctgagggtcaaaaagccctagaggagaggtggcacatgagtcatgaagaggacaaataggaatgtgccagacaggagtgagaagactgttctgggtggccggagtggccctggagcagccagtgatgtgtgtgggccctcgtgcctgatggggaaaggggcagccgtgagtggctgtgtcctggagccttaggtggatagggaaggtttaagcagggcagaggatccattgatctcctttgacaaggacagtaaccctggacatctcttcccgtaagcgtggaagtggccacctcggttctgggggcagtctcctctctcaaggttggccccacccccactaatccttctcacttatctaattcctgtaagctcgtccatcccctgtcccttctgagccttagggctgctctggactaaactgggactgggctggactgctgaacccccttgatgagaaacttgaggcgccctggtgatgggcagtggctcctgattaggtgccaggctctggcgtgggttgggcctggatcgtactctcagcccgccgcttgcaggctgtgtgacctcgggtgagtacctttgcctctctgagccccagtttactcatctgtgagaaggaccatagcactcactgtgcagggtctggtgaggattcagggagggcctagcacagcacacagtatacagtaagcactcaaacgcatgttgtcatggctactgttacctcctcctcagaacggagccttgaatgactcagtcccttggagccaaaggttgaagaccccatttgcagggagaggcccgaactctaccagctatctctgccaggggcttctctgtccactgaggcccccacccacccacccacatggtgagcaccggtggctcttttctgagcttctgcgggggctgggacttggccgggggtccctccccaacctccctccagccccctctgccttcccatccctcacaaaccggaggaaggcagcgaagcagctcatattcatgaaccgtaattcaatcaggcggcgattcctctgggctcggggcgggggtgagaacgaggaggcgcgcacaaaagggccgctttattacctcccgcgggccgggaattgctgctctctcccagcagcggccggagccgctttattgtgttaacccatttgcgtgtcaagagctattgggcgctttctctgcctgtgcgttgcgggccgcgggaggagggctgcggtgccggccggtcacctccgcgggcgccgcccgccgccctgattggttgctaagtgatttgcatccaaggtaatcacttttatctcagaaggatgtcgactataattataagctactgacatcttttgaaatctgcctaatgactattttagtctgcacgggctgggtgtagggagggagattctggaaagggtggaggctgggaagagggatggattccttccacctggacccctgattgcttagttgagaaatatctgagtacctactgcatgcatcaaacaaaagatggggtctctgtgatggggggcttgcatccctgtgggcagagttagtgccacttcagagatggggaaacggagaccctggggaaggggcgacctgcccagaccacacagccaatgtgcagccaccatctgggtctctctgaccccaaattcatgccctgaccactccagtggtcacagtcaggaatcatgtaatcatgcctggatacaggtcaccagactagtaccttccagagtttacgtcataaccctaagaaatgcacatgctggtaccacccccattttgctgagaagcaggggcccagagaaggtattatactttgctgcccgaggtcacacagccagggagtggcagaagtatgaggttcattggcagccagagatgggaaggcagaggcggggttccagcttcccactcctcttcccacccactcgtggttccattcggtaaaaccaggctttaggtaaagactgagcaaggacaccctgtcgcccgtgtcccagtggtcaagtgataagaaatcagatggcccacagcctctagagggagtaagatgagtctgcagttaactggaattctagacagggctggagcagggctggaggagggaaaacctgcagctggtcctggagggcttcctgacaaagcgggctgtgctctgtgccctgaggactgagtggctctccccagcatggagtaaatgggggtgtctctggcagagggagtttggagacccgggagcatgaccaggaagggcagggggagcttataagatggtggaggtgaaagggagattaggagggtgtgcagggggcatcgggtgctgagctaagggtgctgtgaggccctgaggaagagggaagccagtgaaagcatctgagaggcaggggccagctaagatcccagtgccttagaggccaacagagagcttgggagtcgcagacctgggctgaaacccggtgagagagagcacctgcactctcactggctgtgtcctcagagaaattattttacccctctgtgcctcagtttcctcttgttcaggagagtctcaacagctttctcatgggcttgtgggtggggtgagcttgcatgtgcatagtgcttgcagggggcttagctgagcccctcagagctgggtgggctgggcttgaatacaggcctgggccagtcctggccccacagcaagccagcatcccagccgcagcagctgtttggggccctgggggcccctgctattgtgcagagggcacaggggacaaaggcctgggaggtcagggggtgaggccgagactagctgtgaacaggctcccggggatggggacttaatgacgcagaacttaatgacccagagtctgtggggaggggggcctcccttggaggaggagggaggtccagccaccagctgtctgctccaggattcgctgccagggcacgggcagctgcctcacagagtccaggcctgagcttggcactgggggaggcagaggtggcagggcctcctggcatgaaatccccaggcctgaatgcagggcttggccctgcccctcggcatctgcagatctccgtctcttcatctgtgatgggccaagggaccaccttagagggcagctgtgaggtttggcagtaaccgatagccaatgggcagtaaacaggaactgctatttttgctctttatccatccgttcattcagagagcttccctgctccaggccaggctccctgccagatgctggggacatgaagatgaacaagccccagttgccttgaaaggtggtgtgtacctaccgagggagaggcctcgagtgcaccccctcagccacccaacaagtgcatgtgggttaattgccacaatggaggaattcacagtatgtgggcactgtgccaggggcaggggggcacagcagtgaacaagccagacgtgggccctgccctgggccaccaccagtctctcaaaggaaatcagaggtggaaacaattacttctggctggagtagccagggagggctccctggaggaggtggcacttgtaattgaatacttttgcctattatgagaatcacaggacactggtatctgctgtgtgccagactgagtttcctactttggcattttgttctctcatttaatcctcatatccctctctgaagggtgtttttatccctgtcatgtgaatgaagaaacttagcctgatgatgtgaagcagcagccctgggccacatggcaggcccacagaacccccttcattatccacacaagcttttgcctcttcactgcctgtaagggtactgggcatggtaggatcctcgggcaggggccgaggggacgctgttctgggccagctgtctcctttatgagcttcacgaccttcagcaggtcaccttcccccacccctcccaacccagactcagccgcgtccttcataaatgtcaaggatggcaaatctgtggcaggcctggcttgccttatgccgctgtgcccttggcagacattgccaatcaattgctgccctctttccctgctgagttcttcccctgaccttgggttccttccagggctctgggcaggcagcgccaatcaatcagcagggcctgtgagctgaaaccagttgcctgcctggcctcaatgagctcagggtgcctctggcccgtctccatgtggctcagaggaccaggggggacagcgagggattctaggggatctctgtgtatccaggttgttcttaagccacaaaagccttttaggtgggagggtctgttaccctcttctaactcccacttgtgttcatccatgcagattccgagcactgacagtctggatgatgataacagcatgtatttagttcttcctgagagctaggtccttcctgggcactctctcgttcatcattctgcagaacacctgcagcaagcctccctgcacctccagggagaattcttaacccattttagagatgagggaactgaggcttggctcagctaagcagagtagggtcacgcacttgttgggtggccgagctggcattcagacccaagtctgaaagttcacagcctgggacagggctgtaggtggcaggcagacaggggagccctcccagaaaagatgtcatttttttggaggctttaaaggctggtgggcttctgacgggcagagccaggaagggtgaacgtccgggtggagggaacagcatgagaggcagctcagaggcaggcaggtgagagtgtttactaagggagcagtgtgtaaccagatgtggctagaatgtggagagagaggactgtggaaggagccagggctggcctggatgtttggactttgctttcccatagtagggagctctggcagctctttcagcagagtaacagtgaggtcccgtctaagagtacttattcaacagctctgtgaatcctgggtgaggttgcttggggggctaccttcagtctactagaagctttggcctagaacagtgcctagtgcacagtaggtagacatccaagaagtattgattgaatgaataaatgaatgaagactccccggactaaaatgctcctgacctccccaggggcccagctgcaaggaggggagagaccagagtcctcctctccaggcaaagttgaacaccaggcctggcagtgacgggcaggagaaggggccaggcaggtacctgggacagggcttccccttcaccactcccctaccctgctgcctgtccccaggacccctcctagaccttcctgctgggctgtctgcacctttcgagccacacctggcgggcagtgtgggcccagcgcttggggggatgaaagatgaaggttcgtgaccattttttaactcaataaagggagagacaagctgcaggctgcaggccggagatataattagttcacagcagtggcgctttcttgatttagcttctgagagaacaagacaaggatgttatacccaattagcagtaacatccagtcggagcctcaataggtgagataacaagctatttttatgacttttctttcccagcttggagggagcgggtgggggggggagggggtatcagggccttatttcttttcatcagggaacaattattagcgatctcaggatttcccaaagccaaatgatgcatttgttaacccaaacatgcaagcatcccagggtagcagcaggggtggcaagctggcattttgagcccggggtggatgggaggggtgcaggccactagcctctattctggaagccctctgaaaaggttcccaaatgtgggcagcagaagcgcaggcccttgagatattcttagtatttgccttgatttccctacctgcgttcaaagggacataaggaggccaggccagtttccctggggatgaggaaggagccagttttggcccttggcagcccttcttggcaccactgtagattctttctgccaactaggccggaggttctggcacctcagtcttgaacctgccattgcactttgcccacccaacccccattatggttcgccccacccagccacccttctcctgtcctgggtcccgggcccagtccctggcagggccagactggtgattagctcctttctctccatcattagacccgcagtcagggcacccagcactggccaagtccctactgggcagggaagccctgccaagccccaccccagctgcctggctgtgctcccactcctggcgaaggctgggggatgcccggagagggagctggcagggctgctgtgatgccgcatcgcatcggcctgggccccaagcccagagcaggttcctgggcctccgcccctcctcctgaatcttgtcccgccctgtcccacgtcccatcttcctgtcagtgtggagctccccactcccggttcagacaactgacaaatccagccatgcaaagtgggagtttaattgcaaacagtttttacggatcatgggcccatctgtgccaccatatgcaaaagagaaaaaaaaatcccctttttttttctccccaccccacaaactacaaaagaaacaattgccaaggtttttctagctggaagcaagcacagagctgggacccatccccgggggcttcctgcagggtggtcctggcaaggccagatagggcagagatgagagaattccaggggacccacccagaagttgagatctgactgcagagaggctgtgacagcctcagcaaactgctggcagctcctgaacccactgagatctctcacagctctgggccttggcacgtgccatgccatggttcaagtaccaggtcctggccttttccagctacctggctgacactatgcatggcctgtgagacagggcttggtgtggagtgggcattgcacagtgttcatggaaacatgtgaaagagccgtgtcacggggccccaaggacgaggcgccttctgtccccttcctacccaagaaatgcaactccaggaggctggggctgaccaggcctcacagactcccttcttcccagtggtgcctcttgccctggtgcccagcctggctctgccgatgaatgccacccaagatgtaaaggacattgggcgccagcagcccaccctcctcgggccctcagatgaggcttcccccggggcctgcgtgagcttctgagaggactcacctgaagcaacctgccagggttcgattctcatgccaccccatcctagctgggtcacttcaaactgtcggtcctccctctctgtgcctcagtttcttcctctgtaaaatgggagtgctggacgtaaagtgcttctctgcttgtcatctctcttcccttgtgaggtgggggtgagggtcctttgctttgtacactaatgtcttcccaagtttctaattggaacacccaatgttgaatgaatgaatgaacgagtgagtgaaggaatgcatgagggaggtatttggagggctttccggagaggaaatgggacacaggcacttggcttgccaggaattcaggatttttactccctttcttgttggcatccggaaaccaccgtgcaatctatgggaatgatgaactccattctacaggtgggggaaactgaggctcagagagattgagggactctcccaaggccatatagctgaaaagaggccagagctgggactggaaccctgggctgagcaactccagctggccaagtccctgcccctcaggtgaggagagtccagcccagagctgggaaggagcttggccaaggttacacagcaagaaaatagcagccagcatttgtggggcacttcctacccccattttacagatatactgtgtgctgtgctaggccctccctgaatcctcaccagaccttgcgcagtgagtgctatggtccttctcacagatgagtaaactgaggctcagagaggcaaaggtactcacccgaggtcaccgaggtactccagcctcagagccaggccagccaagtcctgcttgctcttctctcttctccctctccctccccctccctcccctaggtctgcaccctgtgggttccctatgcgccttaccaactgtgtgtgccagcagccgggccccgagcgggggttccagtgtccaaggctaggcaccttgcacagccctcttgcagcaggtagcaggggaaagtgggacgcaggaaacatccccatttcctgggacccaggtgagaccaggccaggcaccaggcagcccattcccggcctgtagtgattaccagctcccattgtaatcattaaaactattagaaggaaacgtttgcttgaagcaaatgtcaggcgccaagttgtgctttgtaaacgctcacaattaatgccaatcaggcccggaaaaaagccggcccggaatcctgtctgtttcgtctcatttgtcagctggtgctgctccatgttgcacattttcatacaattgctataaacataaaagggaaactccacagtgttcccgggcgcccggatggtgcgcgccggcttaattacttggtattctgctgttcatttggccgccctgagctggtgggagagagaaagggggactttgtgtagcagggcgagggttgctgggggtcagccagggagatgggtcaggctgctggcctgggcctcctgccccgttctctgtaggctgtgtgacccacaagctaagctgggaaacaagaaaaaattgctaaaaaaaaaaaaaaaaaaaaaaagttggcaaaaccttcaagtagaaaagggattcagagtccaccagacttggtttcaaatccctgttccctctcctagaatagctcatcaggtttatggtccacctcctgcatgccaagcatggggcctcagttttcctcatctgtgagttgagggtaacagcccagcggtcaggatttcaagcctgctggggcctggggacatcatggtttggttttgttttcccatttggttgctgcacagaccctgtgagggtgagctgcccctcttagcagagtgtgagggccacagtcccacagcaggaagtggtggagccaggatttggccccagatcactggctgcagagcctgtaaccattgtaccatcctcccgcacccaccccgggcagccatggggctgaaagaagatgtgatgtctacaggtcccagcacacagtaggtgtttggtaaacagtggctgctgtctgcccactgcctggagatggtcaggagcagcaggggggctcaggcctggcttgatggtcagcaccaacgggatgtggaccttgccgggtggagggtgagaatggagtggtctagaagcaggtgctgttcccgcttccctaggggcctgggtccgcctggcttccagggtgggacttaggagggagatgctgagaacatgcctggccaggccccaggggactcccgccaacccccatccgcccttgccttgcacctggctctgaggtgctgggtgtggttgtgcactaggccccatgttgtctcaccagacctctgacagtccaaaaagttgggtgtgctatcgtcatggtccccattgtacagatgaggaagcagaggtccaagctgacccaaggtggccgggctgggaggtggggatgctgaagccggctcctgcccaggttcctcgttcccaagtctcttgtgccctcctagccccctccctgtagagactggacgcggccctgccacaccttacaccccctccccagggcccttttgagctctccagctctctgtggtcggggtcttctgaggccaggctgggacacactggcctttgtgtgagcttgagccgggccgggcggccagcagagtggggagagggcggtgcagcctggccggccagggacaaatgctcagagcgggaatagaggcccttttgtgtgcctctcggagggggagggggtgctgccagctgccatcccgtgtgactgtggaggcctgagccctccacagaggtttggccgacacctccaggggactggccagggagcctgtcatcatcagctctgcctccttctctgactattttgtgtcttgctcttgtttcctgggggtccttggctgctagaggagccaaggcagccattaacctggtttgctgtgggcctgctgtgtgccagccctgagcccaacactccagccacccttcaggcaaggggcggtagtctcatgtttcagatgcagacactgaggttcacggaggacaggcaacttgccacgctggcacgtggtcatggggtggggatgtggccgactctaaagctttctctgtctgtagagttgccctttgtgtcatgccctggggtccaggtttgcagcttaaggtgctcactccccagggtaggctaggggaagagcagagataggtgctggggactgggcctccaggtgtaccccaccaccaaagtcctgggtgaaaaccagcaggaagtcttcaggtgtctctgttccctgagggacattctgtccctcaatcgtggcgggactctgggctagtggctgcagggcattcataaacaagcccagggccctgttgagggccaccatacctgttcaacccgctctgagcctcgatctccttaactgagaaatggaaatgaaagagaacccgccccaggggcactgggggaagatgtagtgccaggacctgagtaaagtgctgagcttggtacctaagcacactcgggccacacaagcataggctggggtttcccagcattcctgctgcctcctgggaggggaagaatatgagctacagcagtgggtgggtcgtgggtgttgaagtctctcccaggagcataatcatgcaccagggactgtcccactgggtccctgccacagcccactttacatgtaagcagtgtgaggatcagagagctaaggtgactcgtcaggggtcccagggtcccagggtcccaaagagataacacggggattgtggcttctggtgaggcccagcccttagtctcttcctaatccccactttgcctcgtctgtagaaggccactatagacacggagtcccttttctatgaacccagccccgtgggagagcagagccatgcaggatgccctcaaaggccacttggcctcctgcagcatattccagccacctgggatgggcttgcacctgccaggccgtaccttcctctgtgcctttgctcagactggggcatctgccaggtgtaccctcaccatctgcagggctaagagtctggtacctgctcacctccagagccccacccaagcccttttcaccaatctcccatctcttcgtgcacagtgtggcacatggtaggcgttcagtgaagttggaaccaaagatccagtccagccctcagagacctggttcccacctagcaggagagacagacacaaacaggtcagtgacagggctacacatccaaggatggaatcaagtgcgggacgcccacagagcagggagctcccgttccatctctaagactaaccgaacccctactatgctcctgaaaactctgccatctcctttcagtcttcccagggcaaggcagtggggttacaggtaaaaaaaaaaaagaggctcagacagccaggtactgacaggtcacatggctgcccaggacaccttggccattccaactccaaagtcccactccttctccagggtggaaaactcaggtacccggggaccatgcaggtaacatgaggagcaaagccattgcagccaccctcaggacacatcagcccaggggttccagcactgccaggtttgggtttttcccccaagagaaagcagacaataagaattttaggtagaattctagtttttcttttggacattggcaaacacatcataagtttttaaatgcagcaaacagggcaaagaaaaaaaggtgtgggctgatttgcaccctttaatgaccctgtattgtctgggtgaggggcatgctggggggtctcaggacggcttgccttccccatccccggccagcaagagcccccggaacccagtggcatctccctgagcccctcaagacacccccagccagcgccttcaccgccagaggcaggaggcagggcctgagccccacgagggcaccacccaaatagctataatcagcagcctcgccaagacttcaaactcacccaattatcctgcaagggaaaaaaaacacaaaatgaaaacaaattaacatgtttgcatagaagccgctgcagcaacacacacagacgcgcgcacgcatgcacatgctggcgcatgccccagcaaggctgggagacggcgccgccacccccgctccctgggcctggcacccacctggaccaaaatacgggaacaggcccagcagccagcttgtccccaaacctgactgggcactgactccctccaccagctttcagtttttcttcttttcgatttaataaacacatacaattcattgtgtgccaaaatgccactgcaccaatctgtgaggcagatatattatgagcccctttctacagatggggcagctagctgacctgcctgaggctgcacagctagcacgtaggggagccagctggggcttgaacccagacaggccacttccaaagtccctgccatgaccaccgcgccttctctgtggctccttcttgcctgtgggtggtgtgccaaggcctcagtctgccttcgaggtccctcctaacccctgtggcctgcgtccactcttcccttgcccacgccacccaaacggcccacccttaccctacaggctggctctcctccttaccctacaggccgaggggctgttggtgtgatgattattacggagccaggtgaatgtgggttcaaatccctgctccaccagtttcttaccagatggctttgggcatgtggctttgcttctctgtgcctcagtttccccccctgctaaaatggaataaccaaggaggtgaggaagattctgcaggcgagtggctgcctacaaggtactacttctggcacctgcctggggggcggggggggggttcctccagcccacaccattcatttagtgccacaaggcccacctcatcagactcactgagcccctgttggtgcctttgcgctccgtgccaggtgctgcccttgcccttgggacactcagacaagaagctcagatactcctttttctgggaagcagcctgtcctcggaaggacccctcttctctgggccccctgaagctctgtctgacctgggattggggttgcgtgggcgtgtgtctggtcatctttgccgtgtttggtttttctctgggttcctgcagcctggcacaccacaggtgctcaggcagggttggtgactgcactcgttggagcatcccctctcactctcaaggcacacttggggccttgtccctggcattaaaggataaactgctggaaggaattgaggtttaggtcctggggttcaaggatccctgccctcctcccccgctgctgtgtgactgcaggcaaattgcttcacccctgagcccatcactgtcatctcctggggtgagagctgggcgggcagttcacgagtgctacactgcatgtgttcatcaccggcttcatcctcacaaccggctggtgaggaaggtgtggtttctacttccatgtttcatatggagaaactgagtccccaagggactcggtggcttactcaagacagccctgctagtgaatagcagagccagggttcaaactgagttctgggtttttgccttagctgaggtgctgtttcgtccttcctagacactgtccgtcaggagccagaggggtagtgccttgcgggtctggagaatgagggctactaggatgctatggtggtggcgggaggggtaactcaactggctgcaggatcacccctttggcatgctggggaggtgacccagcgcctaccccaggagcggctggtcctgtgggacattgggtgcccactcagaatccggccctcccacagcacagccatgccatgggctttagagtccagcagacctagttcgcatccagatcccaccaggagcaaatcctcttcctctcggagcctctgcccctgctggagaatgggaggcgtggatgtattcacactcaagagaagggcttccagctccacgtgagctgaggcatggcacccggcacacagttgctgctcgatgaagccaccccctgcccagacctcctgcaggagaggccctctcccttatccagaagcttcccagccctggagcctcaatgacacaggctgggggtggggcttgtgttgcctagttggtaagctgggtccggaggaggctctagccctgcccctctgcccacccatgttgagggtctctggggcccgtgtgttctgggtgtgtggaggggtttgtcgggttgaggtggcaaactacagtgaaaagagcggggagagaccccgaactgtgaaccctggaccatgcagggagtgtgggaaataaaggtcccagcccagctctctgttcaggtgggatttattgagcatctactgtatgtctggccttggagtagaaagagaccagcgaagggtttgtgaggcctgaggcccagccttctcactgctgtgcaccctgggcaagccacaccatctgtggacacaaccttctcacgcagggctgtagtcacatcacagtaagaggacgtttgttactcggtggttgagagtgcaggtctagagccccccaactaaaccctggggatagggcaagggccgctttcagtggtcattgtgaagctgtgtacaaccccctcacacccatgcttctgaggctctgagtgcagagactgagtgccgggtgggaggaggttctttccccctcattacaaaagtcatgttcatcttttagtatttggaaatgagtctgacaaagaaaataaaattcagctgacatctaactgcccagaactagcacttggtctcatgtgggaacattctgcccaggtgctgtgcatttggggagtgtctggccccaggaagggccactctgtgctaagcctgtcctgggctcctggacgccacctgcccggccgcctgcccagcagcccattgtctggcatgtgggggcgcggagcagccgttgttctgcacacatctgatcccgtcttttccacatcagatcatttgtaaccgtcaccaggcaatcgggcccgtcgctgattcaatctcggctttgtgctgtcacagccgtttttctgcgctgggctgattttgaaaggacgcccatcctctgggcccacttttcagaaggaggggaggtgggtggggggaggtgtgtgtgagagtgtacgcaggacatgttccccacacacgtgtacacacacacacatacattccactgctacatctcatcacttagagtagaatttgggatgaggtagatgaacaagggcctcaggccaggcccatcatccctacctccgtccctgaccatctgccaccctgagtgcctactgtgtgccccatcgtgcagacacagtagaaccggcactccagtggaagagacagacactaaaccattcatcaagataatttcagagcagtaatgacaatgaaagaactgctgtggtgatgggacaatggccagggcagaaggttgccagcttgaccaggtggtcaaggagggtctctcggaggaggtgatgtttgagctgaggtgtgaatggggaaatggagctggcatggagagtgggagagtggtgtgtactggggacagtgtggtgttgcactgtccacaggtggcattgaacatttgcagtgaggcaagtctgaactgaactgagatgtaaaatccatcccaggtttcaaagacttagaataaaaacaagaacataaaatacctcaggaatttttaaatactgattacacattgaagtgatactattttggatctattgggtgaagtaaaatatattattaaatttaatttcctcttactgctagaaaatgtacaattacatatgaggctcccattattacattttttttttttttgagacggagtctcgttctgtcacccaggctggagtgcagtggcgtgtgatctcagctcactgtaagctccgcctcccgggttcacgccattctcctgcctcagcctcctgagtagctgggactacaggcacacgccaccacgcctggctaattttttgtatttttagtagagagggggtttcaccgtgttagccaggatggtctcgatctcctgtcctcgtgatctgcccatctcggcctcccaaaagtgctgggattacaggtgtgagccaccacgcccggcccccattattacatatttctatcagacagcactggtatagggtatttaggtagaggcaaaaccataagtgcaaaggccctggggtggggacagggttggcttgtgagaggaccagaaagcaagccagcgtgtctgagcaggatcagcctgggacagggacagtgcagatagacattgggaaagggattcacagaggtccttcaaggatattgttagaaaagccacggaagactggcgggatggctcatacctataattccagcacttagggaggctgaagtgagaaggttgcttgaggccaggagttcaagaccagcctgggcaacatagcaagatcccacatctacaaaaaataataattagctgggtggggtggtgcacaactgtagtcccagctacttgagaggttgaggcaggaggatcacttgagcccaggagggagctgcagtgagccatgatcatgccaccgtaccccagcctgggtgacagggcaagaccctgtctccaaaaaaaaaaaaaaaaaagctatggaagccactaggtgagctctacgcaggagagatgtgcgctacacacagaaaggcttggtctggctcccttgaggtggagattgacggcaggggggcgatggggcacagggacgggcaggaatctgttgtagaagagttgctgccgggacctgctggtgaattggctccaccggatccggctccgcagaaagctcactgcttcctgtggctcctggatttccaagcctctggggtttcctgtctctcccggcacccgtctccacctccccagcagctgttccctgtcatgtcggtgcatttacaatgagcgccagtcgcctgtctccaggtggtcagaggttgaaatcccttttgaaaagttctttaaaaaaaaaaaaaaagaaagaaagaaaaaccagaagtcatgcatgttcattgtggaaaaattagaaatacagagaagcacaaagaagaaaaggaaaattccccagttaaccgtcagccgctaggctatgacagggggagggggttgaacccaggtggtctggctccagcactttctaaatcacagtgcctgtggccggatgacatggagggagctccctgaccataggaggggttagagacacgacgcccctctaccctcactcacagcagaggtggaaagctggagactgacccacacatgggtggtgagtggcgtttgactcttggagatttaaataaaacaaacattgagagagcttatgaactctgggatgtggagtggtggcgctgtcatttgggccgagtgtcctgtcctgtttcctaacccctgcctcgaaggctccattcatttctgccccagcctgacccccagaagcatctactgatcttagcattgggctaaaagctaaggccagcccttgccagccacttttgtccactctcctcccccgacctgggccactgcgtcttctaaacactcttgggtcattcttgcacaaggacccagtcttcttcctccccgtcccttggggcctgaatcctcaaaccctgtctggcccaggccaacctcttccgtggggctttcctgcctgctccaccaaccaaccccgtggtcctggacagctcccttccctctctgtttcctcgtgggtacaacgccaatcatgtctttctcccggttgtggcgtgggttacgtgaggtgacgtctgtaaagtactgagcctgtggagaacactaaaaataaaagctagctcttattgctcttactattagatttttctccttccccgttgcctgctttaaccctgaactgtgggtgcagggactgggggaataggtgggaggaaggctagagataccgggcccctcccatctccactgtgggtcttacctttgcccgttgcacacagtgttccgtcttccgggatcccagtgtcatctggtggcatccctccttccctcttttggtctccatttccatgttgtttctccagagagattctatgaccacttccaaaaaaaactgggcggggggctttcggctgagctcacagccccattatgacatcgtagtactgaagctgttcagtatcgattctcagatctccccactcattctttgctggaaggtgatgacggagtcttacttgactgacaattttcattaaagagccgaggctggaactaggagaacagaggctcagcctgcccctggctccaaactttgcaccttgggatccctggctctctgggaagagtgaaactgcccttcagaggtccatggctctgggagagggccagccaggcctgttgccagtggcagtgactgcccctccttctggcaccttctctgagtccctgtcctgaactagcactagtgcagaggaaacagatctccccgctctgaggttgggggggtccctgcctggccctgcataggtgaggtgctctcagtgactcaccaggagggtttgctctccagcagcctggagctccttcatgttctctgtttgctcctctctctcaagtctccatgtggtggcctgtgcagtcccttctgtgggatccttcccttcccctagctttttcctacttacctgttgatagcgaccataaacaatgctaacaacgggtaccacttaggcagctaccacaaggaccctggcactttgttgtaaggaattaaccccttttgcagacgcagaaactaaggctcagagaggagggagggatttgcctaagctcacagagttagggtgtaaagctcagacatccggatgtgaagtcggggacagacactgtcgctctgctaatgaggcagctggtgtgtccttacatcatgacccccccaggccaggtagggtgaccccaacatggccaccgcttgtctccctgccttgtaattacccctctgatgcctcccatccactcagggtctgtcactgccccagcatctagcacagggcctggcctggcacatagttggtgtttaatctgtcatgccgtccccagtggttggagtgctgacggaggcacatcgcagttgtcagttcccatggcgactgacatcactatgctctcaggctgtaccccgcccctttctccagggctcttgcgccgggagctggccgtggtgctgacaggcccaggaatggccacctacccccagaccccagctgtgtgtcccagtaggacacttcctgaggcccaccctgccccaactccctaggacagcctcttgcccatcctttgttcaggagacgttttcctgagggccctgtgctcaggcactgctgtagcaccgtgaacccatagaggaaggatcaaggagagccacatgggactccagtcatttgacgattcatcaaacatttattatgtaccttgtatgtcttggagaagccctcaggaacccggactccaattgaaggtcgagttgagttttaaggggtagagagccagaaagggcttttgagcagtccttctgctcaaaagtccttcctggctcttgggattgcatgggccaaagcctgcaagtgtgcaggtgagagtcttgtgcagagggaagcccacctcaggactctggctgccagccagaattggtgattgtcactttactttttggtctcccctttggctcagaactgccagcatctctggctctagtgcccagcccagaaccaggcacaatggaggggtgttggagccaggcaggggactggcatctttgtcctagaaaccaaagagccaggtatgctctgtgacaagatttgcagcattttagagagcccctggcctgctggggtggggacagatacagtggtaattctggcagaagatgaggcctcctattcaaggggacagtacctccccagcccccaaccttaaaaaaaaaaaaaaaaggtaaaaatccccttctggtgctgaggcccaaatggcagtgggaaataatcacttttcacaggccccttatccacagccaagccctgtgccagtttaatcagcagtgccggtgtgacttgaagaatccccggcttgagagatcaggagaggggttaaagaaaattaccctcgcctcctccatgctaatgtaatctctaaccagatctgcctagccgcagctcaaattgctttttagattaacatttaattattaacagggtcccttggaaggcctccggctcagaacagagatgggggagggagcggcaggagggaggtggggatgggcttctactctggctgccttgctgagacaagcggggtgggagagagaggaaggagcaagggaagaggggtcaggaagggagaaagagagagagacagcaggaaggagaagggaggcatcaggacaggaggcaggtggagctaaggacagggatgtagacagaggagaggaaagagacagacagtggatcttcctgtcgtgggagcccctaagggggttgggggaagcttgcacctagattcctgaggacattcctgggctgggcaagggtccctccactcttcctggccagaagcaggtttgctgcccctcattatttagagaggtctggactttctgaggctttctacttgctcagctcgtggtgctggggaccaacacagagaagtgacccatttagggccacaccaccagggtctgaccctagtattcccaatccagcattcattctcttccccgggccctgggcctctcaccaccatttcaggctcctatctgcctttggagcaggctgtgtggccaggcagcgtgaagagacttgaattacagccagagggatggaggtgagaactgtgggagggctccctcaccacccacctatcctgccaccacccccaggaaggctgcgaggccctgaggagtggccagcatctcattcacttcctgaaagggaattcagagtctgaaccatctactctactccttgcatgatgaactgctgggttttgccagcttcctatcttgtccctgctcgagattctaagtccctcaaagacaatggctacgtctagagcccctttgtgtgcccacagttcagggactgccccacaccttgtacacagctggattaagtttggaaaccaaatgatcacatcctcttatgtccaagttagatggccctcatactatcagctggtccactccccataaaggttcatttgggaaacagactcagagaggtgctgtgacttcctccaggtcacccagccagtgagaaccccagtgcctggcccctgcctggcaggtacaacccagaggcctctggggccagctctcttctctgaactagtcctgttggacaccaggaagggcctggcatgaccttcccctccaggtcacagctaggctttggccttgaatggagccacagaagccaggtgggtagctctagggattggaggtagaggaggagatgggggctcagaggcgcagcccatggctttcccggggtcacaatctcagggccctgccgtgaagccaggtgtgtcctcctcctattctgccttggggtcaacccagcctggcaaggggcagactgctgacctgtggacacgagggaaagttccagatgcctgccacatcaggaaaatgctggaggcagagagaggtcaggaacattcatttttattgggaggtcagttctggctagatgttcctttctggcaggacactttgagtcatttccgtcctcccagtacatggcacagggctggccctcaaaagatgcttgggaagtgtttgctgcctaaatgaatgaatgggtgggtaagaagcaaggcctgggctttactcatctcagtgttgttctgcccaatgctggcctcctgatttgcgctccttgaatgtttatgggatgaataagtggcctctgggagcccttcccctcctctcaccccttccttctgtgatcccagcccctcccacagtagaatcaaaatggatttgggccctggggagaagcagacccttgcttccatccctccctgcccagttgactgggagctgagggctgacgggcccccaaccacgatggagctgctgtacagtgtggggctgagggactgactggcattggcatccttgggctctgctatctaaaagctatgtgaccttgcacagatggccttccctctttgtggccatttcctaagctgtgaaatggagccacagaggccacgaggaggaggcgcatgggcttggtacagagggcagtcaatacatgctcaccaccgttaagagcccaaattgcatgttgctctttcagagcttcccctcccactggcccgtgggctccctgacgccccctgcagccagacaggcgagggcgagatgacaaaaggcaagcagggcccaagcccccaaatccctgttcttttcataaaaacagagacagcctcctcccattcattgttctgctaaggcgagcatcacagactcaattcctcctcggacctgaaaagttccttccttcctttcccctcccctgtcacatttcctttatctaaatcctcagctatgaaaggacacatcgacagctgggggcgttatctggtggaggggaccttttcctcgggtgtctccgagataaggcgtcttatcagcccccatgtcagggaaggtgccaagcattctaatcattgaggcatgcgacgtttttcccctccctgccccccctttttttattaaagtcacaaaagaccttgagcttataaacagtctgatttgcagatagggtttcaaaatgaacagtgctccctggatggtgcttggccaggggggtaatgagtccaggcggggactctgagaggctggcctcctgcagatgggatgatgccaggcagggagggggcaagatggggtcacagaaagaacatgagtgttttaggcacatgccccagtcctgtccctgccttgctgtgtgaccttgtttgggacgcttggcttctctgggcctagatcactttatctgacaataaccaattcattgattcggccattcattcaacacctatctagtaaatgattactcttgccaggcactggggagagacagacaaataagacacggtccctacccctaagaaacacagtccagcggagggagagagatgtgaaaattggcaattacaccttggtgtgattagagcagagatggtggatatctagaggaagggaagggtgagccagggtctgaagacagatctgagttcgaacggatcagggtcacggtgccgtaggcaggagaaccagcaggggcagaggtctggaggtgtgaggcagcctggctggaaggagggccagggggagccaagagggagatgaggtgtggtgggcaaagagggctgggctccacgccggggccagagaggttttaaggccaaggagggggatttgaccgtcttggttgcagatgatggggatgatgcaggagttggaggtggtggtcccctccccacttccctcctaggacaccccaccaccctgccatgtgcccccagtggcaggacacagggttcctgggagaatgggcagtgagttgggagaactggggttgcagagagaaaaaagtccctcctctttaagtgaagagcatctctcaggctgcctgtagccctccagaagcaaggaatgggaggatgtaggcagctgccctggcaaagctgagccaaagctgaggcctacacttggacaccatcacaccctgaaaacccctcccagctcccagaactgcctggcatccaccataagagcacgctgacaactagagccctgctgggaagggagctgatggggtcccaggaggctccagaataggcgacctgccccttccccaacaattgcagcccccagcccaccctttttcaactgcaaagcatgtgggatgtatggcccaagggacattagggcacctagagaagggctggacttctggaccccagtaaaaggctggagatagggccgggcatggccaggactctggaagaaagtgacctggaggtacccacagggatcatggagccactgttacaggccagagagggtcattaacccagccggggtcacacagggtgtgctgggaggcaaggaggttccagccttccagcccaggtttccacagggcaccagcctctgacctccctccttactggcctgggtgcagccaagctcagtggtgagggggtaagtgcacccagccactccctgcctggcaggccactgctccctgtggcttgggtttcccatttgtggagggagaggtcttggactggctttctccggatctccctcctttcccccaacccctatgtcagagcggctagagatggactctgccctggagcaggggccacagaaagaggctggggcagggtgagggaggttgccacaggcctcttaccttccagattgcacatgattgtgagtctccatagaccatccgactgtgcgtaagagggtgcctgtaagtgcagaggaacatgccatgcagcaaacacatatgtacataggtgagtgtgtaccagggtgtgtgtgcacacccagccctccctgtgcacatgcacggcgtgtcctccagggctggtgtccaaggctgtggtgatggcaggcccgagtcaggcctgctcccgccacctgctcacattccaagtccccgaggagaggagcagcactgccttcctgcagtcaaggactttcatccctgcaataagccccacttcattccctttttaaactgtataatttctgcctgattgtaatggcctattttaaaattaccagaaatcaaagccgggaagtggatactgcagcttttattgcgtctctgtgttaaggctggcgattggggagggggcggtgagaatcacctcccctcccctccatcctccactctctctctctctcgctctttttttttttttcttgagacagtaataggagaaaattggttttgaaactgaataaaagtccctttcagaggaaatcatttctttcagggtacctttgctgaaagtaaaatagggcataatgaaaggtggttacgcgattgtctttcatttaccgagaggccaggacagacgggaggctgcaaccgtctccgggaaatacaagattggaataattgcgccgtaacaaggagcttgttgtgaaattagtatcttaagaaagtagtgaaaaaaggcttttcctcatgaatacttcattattagaagaaagcggcagaatttaggactccagacacctgtttagtattaaataacttccctttcttccccttcaacaccccctctgctttcttcttcttttttaaaaccaacatgaagattgaggtgatccagcttggctgctcaggactgtgggaggtcaggaagtggtggggacagggtgcccgggaagatggacatcaggggtgtccggggttgagctcaccctgagacctgccttctccttagcaagaagggaggaagggacctctaggtaagctcccaccgccaccctcccattggggcctcacaggcaggcccactctgaccctgccagtcaggggctttgggctctcaggaatgtgcctgggcctcctgaaacgttctctgcaggagagtgggtttggggaagctgaaggcaagtgtctgtgtgaatgtcaggctctggccgttggggaaggtaccacacgggcctgtgtgcagccacatctgagctgctgccctgcggggcacagatctctgcccttcccattcagggtaaggagctcaggcagcgacagggatctcgggtcagggcagccttgatggcccattggggctgggctcagggtgcagcatggatcaaggttcaagagccccttgttctctcaggaaagccatcctgacatctcccctccaggggggctatgaggatgccctgggcgggagacagaccagtacttcagtaacctgggacacccatgtacccactggcatttcccgagcacccctctgtgtagatgcccaagatgaccaagtggggtcttcaggctgacttgcttacagggggccaccaccggccggaagcacagcctgctgcggggcacggagggagtgaggatctcacccagttgggggcatcagggcaggccccagagcagatgacccagatgccgagcagggccggggcatgtgtgatccatcagtccagcccccactcaagagccctggattctgtcccttcccatgaggccacagatgggcctcttgatgcctcaggccttggtcccctcattggtcgaataagggaaatgggtgtctgctttgagagtctctgatgttcttcggggttgcagggagactcccggggggaatggtgggaggcgaacacggagcagcccccaagtgacagagcaccccatcttcctcctgcagggacccagtcgcagagcgcaccccactggggacccccagctcagccatgctggcctgtctgcagaggacccagaacgccccgggccaacacctggcctgcccgagcaagagcctggagctgcgcaagtgtgagtaggacgcctccccagcctttgcagggcaggtcgtgggcagagaacgccattcaccccccaggatgtccacctaccatggccctgtcggaaagtctctatgctctcttaggcccccaggccttggccccggctgtgctgccttcctggtctccatccccaaaatgacacccactcctttggccagctcctgtggagcaagactctcaactctggcttgacctccttcccagcagcctcttctgaccaccaccatcgccatgccccaaccccgcctctgcaacttcaccaccattatctagccatgtgtgtctcccttaccaccattaaagtaggatgacgtggaagcaaaaaatagacagaatggggtccccgcttgaggcccatgagctgtgtggtcttgggtgtttccttccctctctggccttgctttttcactgggacctagacctggtgaccaggggtctgttctcactatctaggaccaggatctgaaacgctctgatttggttatttttagctatcataatttcttttttaatgaagtacttagaaacggagatttgcattaaaatatggatttctactatctcttgaaaaaaacaaaaacagaggctctggtaacataggcctgtgtgcctgtattgcagctatggttagagctgaatgactgcctcttttaaagggatgtctgtctccaggtcaccgcggtccccacccctccctattgcttctgtgctatagcccaggatccgttgccatttagcatgatgcttacaatgtgaaaatattttttttcttttaaatatttatctttagacaagggaacatattcatgttatgcaacacttggaggaaggaaggggtatatagacaaaagcctccctctgggccagccacccgcttccctcgcagagggggtccatgtcgtcagcttcctgggtgtccttccagatgttttatgtgcatcccagcaaatatgtatggagacgcatattttacacactatcctgcatctcactgtttccctttgtaatctattctgtatgtcagcttctaaagagcttcctcattctttcgccacatagttttctctagcaggggtggcccataatttatttggccagtcctctatttagactgtaactgacctgttgctgttacaagcagtgcagtggtaaaccctggatgtgtcacgaggatgtggataaaactgcagggtacatttctggaagtggaaataccgggtcaaacggatgtgtgtttggcattttgatagctgtggtctgatggacatctttagatggtgtatctgtggatacctcacattgtggtgtgagagagtctgttccccacccctcaccatcacagcatcatatcacacttttaggttttgctcacctgggcagtgacaataggatcacaatgtgggtttggttttgttttgttttgtttagggatacaaggtctagctatgttgcccaggctagtctcaaactcctggcctcatgccatcctcctgcctctgcttcctgatcagctgggattacaggtgtgagccactgcacctggctacagtgtagttttaacttagttttatatgaatgaggttgagtatctttttgtgtctgtgccatttgtttttcctttgactaatctacttatctccttggctccttttttttttttaattgggtggtggtttttgttcttattgatttgtaggagctatttgtgtatgatggaatcagacctctgtctgtgctatgaattgaagacattttccccaagttggtttttgtttttgattctgccatggaggaattttgtttggaaagtgagacttatcagtatttccttttatggcattggattttgtatcatacttggaaagtccttcctcaggctgagattattattttttaattcccccaggtttcttatagatctctgatggtttttaagaaatgtatgagaccgggcacagtggctcatgcctgtaatcctatcactttgggaggccaatgcaggtggatcacgtgaggtcaggagtttgagaccagcctggccaacatagtgaaaccccaactctactaaaaatacaaaaattatccaggcatggtggcacatgcctgtaatcccagctgctcaggaggctaaggcaggagaatcgcttgaacccaggaggcagaggttgcagtaagccaagatagcgccactgcactccagcctgggcaacagagtgagacttggtctcaaaaaaaacaaaaaaaaaagtatgctctctatatgacttatagtttattgggtacaaagtgtgaggtgtggatctaaatacattcaagtatcagtgcagtgctgttttaattattatgttgtttaaaaattttagccttattgagatataattcatataccattcaccaatttggagtgtacaattcaatgatttttagtatattcatagaattatgcagccattaccacagtcaattttagaacattttcatcacctcaagaagaaaaccgacacccatcagcagtcacctcatctctcctcaccaacctcctcccctttctctacaatttccctattctggactagtgactggcttctttcacttagaataacataagttcatctgtgttgcagcatgtgtatatccaggtcgagtagcccttatcagaaatgcttgagaccaaagtgttttgaattttggaaaatctcattataccagttgcgcatcccaaatcacaaaatctgaaatgctccaatgagcatttcctttgaatgacatgtcagcactcaaaaagttacagatttgggaatactttggattttagatttggggtgctcaatctgtaatactttttctttttttgtgacagtctcactctgtttcccaggctggagtgcagtggcacgatcttggctcactgaagcctccgcctcccaggttcaagtgattctcctgcctcagcctcctgaatagctgggattataggcacgcgctaccacacctggctaatttttatatgttttagtggagacggggtttcaccgtgttggccaggctggccttgaactcctgacttcaggtgattcacccgccttagcctcccaaagtggtaggattacagtcatgagccaccgtgcccagccctatagtacattttagtatttggtagaggttgttgctccttgttctccccctctacccaaatttccttggctcttttattattttcttgtctgaactatagaatcaatttatctaggtcaaaacaaaaatcctatttgtgcttctaccgggattgcattacatttacagatgaatttaggaagaaatgacacttttatgacactgcctttcccaccaaaacatgatacagttctctttcatgtctctcgggaatgttttaacatttgcctggttgaaatcttccacattgtgttggttatttctggatagtttagcttttttagctagccttttcttccagtggaaggtcacttatatgaaggctgttaacttctgccaccttactgaattattttattgttcttaatggtttttcaatttaggcgcttgggttttccagttatactatcatatgatttacaaatgataaatttaccccctattttgttttataccttaatttctttattttatttaatagttggctactatttctggaacaatgaaacaataatagtggcgataatagacattcttgctttgtagcttctagatttccccattaagcaaatgctggctttggggcagttagtttatcaggttaagtaagtatccatctattcctgttttgttgaggattttaaaaatcaagaatggaagttgaactttgccaaaagacttttcagtgtttatgatcacattttttcccatcggtgagttaatatgaataatagatttcttaatactgaacttattgaactggggtttaatccttgcattccagattaaaccccagttggtcatggtaaatatttctttataatatactgctggattgaatttgttatttaggatttttgcctcagtctcgtcaaagagattgttctttggttttctttctttttttttttttttttttggaacaattttggttgggttttgctatgttacactgacatcatgaagaaaatagaggctttccttctttctctttgaacagtttaaatagacatggaattatctgttcttaaaagtttggttgatcctccatgaaactgtttgggctagtgcagttatttggggtgagtgggtagctctttgataatgctatttcttctctaataattagtttgattgtttgttctactctttttgaatgacttcggtaaattatgtttctctagaaaagtatccattttatccgggtcttcagattgatttgcattagtttgaactaaacaatttttacaactcttaagtggtgagttcacccttatttcttatattgtatattttgtgctctttttcctgtttttcttcattaggttagttagctaatgatactgtctatcccctttccccaaagattcatctttaggatttatttattagtaattattcttttctggtttctaactcattaatttgtgcttttatctttattaaaaccttccttctgcttttagtttttttcccttagagagttacatttttacattaatctttttttaaaaaaggagaaattcaggctacaaagtctctgagcacttccgagctatatgtagtattttcattattattattttctagatattttaaatttttaacctaagactcatttgagtcccacgcatccacacaaatagtaggtgttttgtgtgtgtgtttgtttgtttgttgtttgtttcgagatggagtttcgctcttgttgcccaggctggagtgcaatggtgcaatctcggctcaccataacctccacctcctgggttcaagtgattcttctgcctcagcctcctgagtagctgggattacaggcatgcaccaccatgcctggctaattttgtatttttagtagagacggggtttctccgtgttagtcaggctggtctcaaactcccggcctcaggtgatttgcccacctcagccttccaaagtactgggattatgggtgtgagccaccacgcccagccttgtgttttacttctagggtggtggtagtgttttttatgatcagagaatcttgtctactatttctactttttaggagttttttgaagctttctttgtgatataacctatgctaattgttgtgagctttgtggatttttttatggggacttaaaaaggtgttcactttgttttcaggattcagtttggtgtataccaattttatctcccattaattaggctattaggttttctatatccttacttacctgtcatgaatagagaaaggaactagacacctactgctaacatgttcctgtctatgtcttcttgtagcacctgtatctttggcttttgaatggtgatgcaatgttatttaatgcatagatattaataatcttaaatcttcataatgaattatatcctaagagataaaattgaatccaggcccaaaagtccaggattcaactttatctgttaaaatggtaatcgctgccttttaaattcacatttttcttaaaacctttgccaatccttgtatttcaacctttctgaattactttgtttagatgtgactcatatactatagagttggattaagctttgtgatccagtctgaatgccctttttttcttttaataggagagtttagcccatttacatttattgatatgacacatgtggtcttagttcagtcatttgtgctttatttaagttgtcctaaaaagtctttcactgtgtgatttgtgttctctgctttgttttgtgtacctactaataataaggaaggttggtggccttgttctaatggtataactattccttaattctcttagaatagtatctgttattttccctaagaggaataaaatgatgaaattggtagattttttctctccacaacattttcttagagttcacttcatattttcaaaactctattgtctaacatcaattttaatgatatgttttgattccagctattaaaattgacgatatcaggcttggcacagtggctcacgcctgcagtcccagcactttgggaggccaaggtgggaggatcacttgaagccaggagtttgacataaaaactaggatatcagtctacttataatcttgtccccttctttcttccttcctttctcatttgttattagcgatgctattagtgtattctcagggcttataatatagcatctggtatgtcaccacaatccccacatttgtttctttaataacaatagtgctcactaccaaatcttttgccttggttcacccattgtctgaagttggtcctctagtatattccttaagaaggcctcatgtgaacaatactcctggagtttctgcacattcagaacggtctctctattgcctttctacttgagtgggtttaaaaaaaaaaaaagttcctggttcacgttgtttgcttgaggattttgtaggttttgttctactgtcttctaatattgcatgttgccatggagaagctgaggactgatttttttcccccatctatttgatttcgatctttccatatctttcatgtccagttacttgacaaggatgtgtcttggagttgaccatagagagtctgttttccctggaacacagtattgtgccctttcagtttgcagatccgaggcttgtattttagtttccttccttggggactccagttaagcacatattggctatctttcacctgtcttccctatgtacctttttctgattagacctttctgactcattttatgttgctcactttttttccctatgttttctgcacctctttttttttctcctgtgctcattctatacttggacagtatgatttttttttcttctgctcttgtatatcttctttgtgtttttgctttatagaaagaactgcttactaaattttttccttcttgatgaaatacttgtctatgatcttcatctcttctgtgactatatccttctgatgggaggtgtttttggccaaccattaatttacttatgctttgccttgctttcattttttagtatattttttattaggtcctatgctggttcaatttagattatttttattaggtcctatgctggttcaatttagattactaggaggaaatgagtttttcccagtccatttgcgggagcttcaggttggggaaaagccagggccatgtcctgagctaactaaaaatttccatacaacccagagtttcctatgtgtgcttatttatcctctttttcctcagacccaggttcctgaaaatatggtttgtagccccacctatttttctcttctaaaccaagtaggtctaagggaagaacctgtcaccagctgacaaacccctcctttcactgcttcaaataaggggtttagattttgtactcagggcgtgcccctcacttttggaaagtgtttgctgctgactttgaaatctgtaggtgtggcccttttttctgcttcttagccctacttgatctctgctactattggaagcctgttcttttttgtttaggggtttagcagctacactgtattacactgcaggaataaaaaaaatggtaacatttaaccagcccttccctgatggacatttaggttgtttctagtctctcactattctaaacattcctgtaatgaacatctttgtacatgtgcatctgtgcaaaaaaaaattccaggctggactgtctcaaagggtctgtgccttttaacctttgattgctactgtccccctgtcaagactccctgccctctgctaccagatggctagaggaggggctgggcctgatgacctgggctggcccttccttcctgctccaaagccagaacaggagagtgtggatggtcaccaaggacatcctgcttcccccgcccattcagatcctttgacatctcttcacttattggaaaagacagtgactctgcctgtaattgaagagcacaggaaacaggaaggcaggaagagagataagcagctaattgaattgggtgccctgctgctgccaatcagtgcctggacgctaagtcaaggaggctcctgccctttcctcccaggcatggttcttgggtgatatggcccagatctctcctcttgtccctgttgcccctgggcagaaccaggacaggaagggctttgtgaccagacctggggccatgctgtgttttcagccaagggagaaaggtctcgaccaggctttggacaacatgaccttggatgagtggttcagcctttcaaggcttctgttctcctccctctgtaaaacaagggctcagatgaggtggacctaagaagccacccagctctggccctctgtgatgataatgtcaaaagcttggtttagggggacgaggtggtccagtctgagacccctgtctcccttttcctgtaaaacagggatcagagtagcttgtgatgaggtctggctgtatgctgagaaatggccagggaaccagaaagagccacagttcacttctctgggatccaaggtcagatgggccagaggaggtgggttgcaatgagctgtgggtccaggagttggggcggcaggctgtcgtggcctgtcctaggtgactgggaaaagtgacctgcagaaaaacaaaggaacctgcctacccctgggccagcagcctgtgggtctcaactgctcagggccttccccactaattaataaatatttgactttcccattatggagttaatatgcaaactttgagtcacacgctgctgaaaatacaggctgtgcagaagccccagagaggcaccgtgggggcctgtggcgaggtggggttactcagggactgggcctcgtccctgtccaagggtccaaggagggtggagccaaggcagctgtcccaggaggcagacatgagcacccaccctcctcagctggaccttgggtaagtgacgtggcctctctgtgccccacactgctcttctgtggctgagggtagtgtgcccaccctgccccatccccatgaacccctagggcacaggctttgggactgtctaagggtcaaatacagagagtgccctgatgggggtgtgtatgtatggtcttggacaagttagtgactgtgccttggtttcctctgctgtgacatggagacaggaatggaaggagaggaccccgcagggcctagcagctgacccagatacctcacctgcccccatcccgggggggggaacctctcccacaatatccatacccacaagggggcaagaaactccaccacccatattgctcgtgatagatgagaagctttgaagggcttgtcgtccaagaggatcagggagcagctcttccccaattcccagcctcaccccacccccgccctacagaccctcaggacgccgacaggctggagctactgcctaagtgaaccgctgcccaccagcattcctgcaggtgccactgcttccactgatgctaataaaagatggaagaaacaaagcaatttaaaattccaatgaaattaaaaataaatctagggccgcacagcagattcagttacgtagctattgctgagtgcagcctgagggatggaaggaaggtctggggccacccctgccgcaggtaccaagcctgcaagaggacagaggctcagagatgaagggccaggagcaggccagatagatctcaaccctgtttaggatttaacaactgaaaataagctccaagccaactaggaaggaagtcagcctctttcatttaccagagtccaaccatgatcgactacaaacaaacttgaggcttgataaaatcagagggagacaaagatccgaatcactgcttgtccacacactgcacagaggctgtggccagcacagctaagctaggacaagtaaattaaaaggtagtataaggattagaaaggagtaaaattatctgcatagaaaaacccaagagcccagttgcagtagtcccagctactcaggaggagtccaagagatcagcctggccaacatattgagaccctgtctctaaaaaaagaaaaaaaaaagaaaacccaagagaataagactttagcaacgtaagatcaacatacaaatgcaaccgtactccttgacagcagaggttggcaaacattttctgcaaagagcagatattttcagctttgtgagccatacagtttcttttgtaatttattaacactccagttcttgcaggaatacagccacagacatacataaatgaatgggtgtagctgtgttccaataagactttatttacaaaagcagccagcaggccagatttggcccacaggcagtagtttgggactctttttttttttttttctttgaaacagggtcttgctctgttaccctgactggtgggcagtggcatggtcatggctcgctacagcctcgacctcctgggcttcagtgatactcccacctcagcctcctgaatagctgggactacaagctcatgccaccatgctcagataattttttaattaatttttagtagggatggggtctcactatgttacccaggctggtcttgaactcttgcctcaagtgatcctcctgcctcagcctcccaaagcactgggattacaggcatgagccactgcgtctagcctgtccatttttaaattcagcaatttgtctttttattaagttgtaaaacttcttcatatattctagatacaagtcccatatcaggtgcatgatctgcaaatattttctcccattctggagttgtcttcactttctttgtggtatcctttgaagcacaaaagttttgaattttggtgatgtcacaatgtctttggtcacttgtatttttggtgtttttgtctaagaaggctttgcataacccaaggtcatgaagatatacactcctgtgttttaagagttttctgattttagctcttccatttaggtctgtaattcttctttttttttttttttttttttttttttttttttttttttttgagacagagtttcactcttgttacccaggctggagtgtaatggcgcaatctcggctcaccgcaatctcggctcaccgcaacctctgcctcccgagttcaagtgattctcctgcctcagcctcccgagtagctgggattgcaggcatgcgccaccatggccagctaattttgtatttttagtacagacacggtttctctatgttggtcaggctggtctcaaacccacgacctccggtgatcagcccgcctcggcctcccaaagtgctgggattacaggcatgagccaccgcacccagcctgtaattcattttgagttaagttttgtgtacatcatgaggaaaggatccgacttcattcttttgcatatcgatacctagctgtcccaacatttgttgaagagaccaatctttctcctattgagttgttttggttcccttgtgaaaatcaattgaccataaatgtaagggtttatttctggattttctattccattgacctgcatgtccatctttatgccagtaccacattgtcttgattcctgcagctttgtattaagttttgaaatcagaaagtgtaaatcctccaactttgtcctcttccttcaagactgttttggctattctgagtcccatgaagtttagtctcagcttgtcaagttctgcaaagaagccagctgaggttttgatagagatttgcattggatttatagatcaacttagggaatattgccatcttattattgtcttccaatccatgaatacagggtgtctttccatttatttttctttcaacaatgttttgtagtttacagattttgagttttgctcttttgttaaatttattcctcagtcgtctttttgatgctgttgtaattggaattttcttaatttttggactcattgtgaataaatagagttgatttttgtatattgatcttgtatcctgcaaccttgctgaacttctttattctaatagttttttagtgaatttctcaggatatcctgtatacaagataatgtcatctgtgactagagatggttttacttctttctaatatgaatgcttttttttttttttttgtctaattgctctggctaaaacttttagtacaatattgaataggagtggaaagatactttgtcttattcctgattgtagagggaaagcattgagtcttttaccgtgaagtatgatgttaactatgtagttttcatagttttttgagtgtttttatcatgagggatattgatttggcaaatgctctgtgtctattgggatgaagatgtggtagttgtccttctgtcaatatggtattaacattaattgatttttggatgttgaaccaaccttgcattcctgggataagtcccacttggtcatggtatatagtcctttttctaagtggctggatttagtttgctagtattttgttggtttttgcatctatattcataatggctatatggtccatagtttttttgtgtgtaatatctttgtctggttttagaattagggtaatactggccttacagaattcatctggaagtgttctctcttttttttatggaagaggttgtgaataattaattcttatttaaatgcttggtagaattcacctatgaggccatctaggtctgggcttttcattgttggtagtgttttgattgctaattcaatctctttacttgttataggtctattcagattttcaatttctcaagttagtcttggtagttgatgtctttctaggaatttgtccatttcctctaaattatgaaactctgacaaaagaggcaaatggcctttatggagaagataagtttattcagtggtattttttaaagacctaaataaacttagaaatatgtcatgcatatagacagagattcaaatggaagaaattcagtccctacatcttgagcatttgtgtgtgtgtaactcaaaagctgacttaattgataaaagcaaagggaccaaaaatggccaaggcacttttgaaaaagaagtatcagggttggggaaggggcttgtcctgttacagcttcaagttgagacagtgggatcagcacaaggaccaggagacaaagcaggggttgcagatcactggggagacatatgccatgctggggcaagtggttatccacagggaataagtgacagaggaggcctacctcacaccatacccaaaaaggaatcccaggcagactagaaatctaactgtggaaagcaaaaccatatcattcttcgaagaaaatgatggagaatataatccccaggatagaaaggatttccaaaatgagagaaaaaaaagacaagccacaaattgagagtgggtgtctgcaacacttataatggaccagtgtccagaatagagagccacggatgtggctgcagaaagacaatgatgggaacaggcagggagccaggggtggggagggggcgggacgggtaggtgagtcagaacaacatgtatatggctggagacagacaggagtaggtctatgtctggagaaggcgagagatgaggccgggctgaaggcaaaaggacaggcagcaacatcaggacaagacagcaaacacagacaaatctggggccctgggtgcaggcagagagtaaggtgtgggctcccaaagacagagcccagctagggagtgggcaagggaaactgaggcacatgggagcgtcaagaaagtcaggctggagagggattaaagtgtccccagccccaccagcagggccaccttggccgctccagggctgtggggtgtggaaggtgcgtgtggataaatgtgtgcccggagcacctgactgtctttgtatgttgagggtgtccctgaatgtctgggcacacatgtgagcatctcagcacacgtatgtagcttgcgtgtgtgcacatgttagagaatgagaggcagggtcctttgtacagggcccattgttcgctgctaccctccactgccagttccagcccagaaagagctaaaaggaaggtggccagccttttctgagcacctgtaccaggctgactgacatgcattctgtcatttcatctccattcccctgccctcacgggaaacagacatcaggagagctgcagtcacttccctgaggttccctggctggtcactgggatgtgtggattcacacctgtggctgacctcaggggccctcaggctaccaccctagtcattcggctggggcagggtccctgggacagccaggaaggtatggagcagccactcctgcccctccccacacccctcccataaaggctggagaacagctgtgtctgccctagcccagccgccgtccctgcccccactcctgggcgacctcattagggattctgcctctgccaccagctaattagtgtcacgttaattgagcattcaggaggctgccacctccaagggcagagtgtggcagcaaaggggaatgcagatgtggagctgctccccctggcgagctggggccaggccctgtgccagggaccccttccatcctagagaagccctggacaccccttgctcccccatttcaacacaggtaataccctgagccctaacaaaggaggcagtagacaaagcgtgcaacggcttgagaaagaaacgacactgggtgaacacctactgtgtgcttgcacacctttcactctcccctctcctatgggaaggcgagaatttgctcccttctaccgtccagaaagctgaagtccaccaagggaaccccttctccaggggtatgcccagtgaagcagtaggaacctaggaccgcagggggatccaggaggtagctctagtgccagcagaacccacctccaagtctcctgactgccactcccagctccttggacaggcgacttgccctctccaagcctcagctgcttatctgtcaaatgggggcagccccagaatgcaccccacaggatggtgagggctgaagaacacacgcctctccctggacccagcctggccctgcctggctcactctgcggtaggtgcctggggtcccatatcacaggccctgtggtgcagagtgttgcagtccaagctccccgctgctccatggtccctctggcacatccccaacccactccgcctgccctgccccctcctcagcttctggaaggcccgctcttgtgtctccctatagcaacattaaatcccactcaaagggctggttttaattggcttaatatactcgttaataaccgcatctatttaacacacctgtaaaaggcccataacattaacttaatggcagcggcagttcgtccagcacttccagcccagccagccttttaaatttcccgacaagtctttaatgggggccgcagcaggcagaggcagagtgggggaaggagtggccccagtacacagtggggagcaccctggcttctgcacgtttgagcccagatgctgcctggcggctgcccctgcaacctctcaaaggcctgggagcgggattctttggccttggagccgccatccatgggacgctttccaagcaccttcggtggtggcagctgcaattatttagatgtcagggtggtgagaaaaaacaggatctgccctagaaggtctccaaatctagcccaggagaaaagtagaccgacagctacagcatgggggtcctacgagggcacgtcaggggctgcctggctgagggacaccttggctgagacctgagggtcaggagagccagtgggccaggggtatgtaggcaacccctcttactgcatttacccagcacacaacgcaagctcctactgtgtaccatgcaccagtgggcaccagtgcatggtggaacgctgggtggaggccgcccctgcctcatggacagcacccccacacacacatttcaccactttggatcaggtgctgtgactcacagatgaggccctttgcataggggcgtggggcaggggaaacacatacagacccggagagcagtctgttcaggtggtcagcacggggaggcagtgcttcagttagaccctaaaggaccagtgaggctccggttatggaggaaagagggcacatcagtgtgagagaatgggcccgagccacagtaccaacgctgcccagtgactgagagcaggagccagggggatggaggacctgggctcaaatcctgactcacaaatcctctcttggccaccagtggtctcaaactggcagcctgtggaccacatcccgcccacctggtgtgtggttggccctgctgggtatttgaacgctgcttaaatgtgaacattctctggtcaggacacaccctccctgcccacctcagtccctgccatctgtcctctctaggcatttgtttgtgacccccgcttgacactctactccttgaacgtctgacctcttctgaagcacggggctgccacaaggtctgcggaagggcaaggccatgagggtttggcacaatgcctggcctggagggaacagtcaacagagggtggcgtatgagaggaagctggggacgccatgtgtggttccaggggcctgcgggaaggagacctgggccaggtggccagggccttgaatgccaccctcagcagctcagactcacgcaagcaggagctcagtggaggggttacagaaagaggcagctgggagcttggaggcagtggagggggctccgatgaagtcatcaaccccacaaccatgcccccactgagggcaggcactgagctaagccggctcttaacacctctcacagaacctcccaggtcagcagcagcattcacccatttcacacaagggaaaatgaaagctcagagagggacagtggtgtgcctcaggccacacagccagtgtgtggcagagctgggacttgaaccagatctgtggctcagagtccacgaattccacctgcagccccacccccagatgctgtaaggctgcccccccaggcctctgtgctcttcccaggagcagaagctgcctcaccaaggtgggtggcgagccagaagggtccacgggagtacgaggagctttgatgcagctgccaagggcactaccccaggctccaggcaggacccgaggaggacagggagctgtgcgcccctccccccatcctaaatcaatactcagtcactggctgctggcaattatagaaaagcacagaggagtaaaatccccctgccatcccataacccgggccctcttccccaggcaggctgctgtcagcatttggggcttgttccttcacaccttggttctatctccttccagagagaaggagagagcctgcgagggtgtagtaagttacaggcatgtgggagccgcctctttccatgtgtctccctgtccatatcccccacatctccaggcctctcgaacctcatgtttagggcccagcaagtcccattgcttctgagggcccctgggtgtgggtactctgcctggagctggcagttgggcagctcccagggcttcctttggcccctttccagccagcagcctggggggtcgtaggaagacctgagtcagatctctcctctcggctcagaaccttccaaagcagaggaaacccccgggtcctggcagtggccctgaagcctgccggtttgcagtgcactcccacctctccagcctgtcttccccacccaccctcaccctgcaccaactgcttccccagctgtgccaggtcccatgcattcaccaaccccccaagactaccttccatcaaccatccacatggctcctttgcccacctccctccaatctgtactccaaagccacattatcagaggaggcttctttgctgaccaccctgtccaagctaggtgccgctgcatcttgccactcatagtcccatgccctgctgttctggttactgtagctgtgtactaacccaaaaccagcagtgccaaacagccagtcatgctcgggaataggggccgggcacagtggggagggtgcagctgccctgtgatgtcctggtgatggtaggggccatggaaatcttctgaagacctgcatgctcacatgttaggcctcagcttcgtcagaacgcagtggccaggttccaaggatggaggtcccaagagaacatattccaggtggaaggcacattgcctcttacaacccagccatgagagtcacacggcgccacttccatggcatcctatttatttgatagaatggagtcacgaagccgcaggccccctccccaccatccttgccactgctgagaagcctgtcccagcccgctggctcacccacttccttcatgtaagaccttttcctgtcattacatttaccaaaacgggactgtgcaattgcactaaacactcgcagctgggcccactttcaagggagagtctagagccttcaccaagctggggtcagggccccaagtagtctgggaccccaagccacctccattgctactctggtggaacaggttgggtttgaggcacccatgggtgagctcaggaaagtccttcagggaacaagatgtaaaggaggagctgcaaacccattggcttccaggggccaccggagcactgtggccaggccaggcttcagacagggactccagtgacctggaggctcatgccccacctgaaggcactcacattcaaagcacgttgaagcactgagcagctcccccaagcccatctctaagagggactggggctcagggccaccagctggaggttgctaggtgccaggcagaagcccagggcaggtgtgagagctgcctccctgggtggcctccctgcctccttgagcctctaggctgactctgtggtcccttctcaggactgtcctcctcctgattctagggaagaggagggcctcatgaagcccctggctttgccctgcctcaaggtggaagtagggtgaagacagcctggaaagcagacagactgggcctgaatctcagctccaccctttgctgattgcatgctcttgggagactctgagcttccacttcctgctctgtacagcgggaactgcatgagtcacctactgccgtgtgacaagtaaaactcagtggcttaaggcagcaacagtcatttaatatttctcatggtttctgtggcttaggaagttgggagcagcttggctaagtggttctgctcagggtctgtcatgaggttgcagtcaggatattggccagggctgcactctcatccaaaggcctgactggggctggaggatctgcttccaagaagtctcacatggtcttcttggctgaaggctgcagttcatggctacatgggcctctttctccatgggctgcttcagtgtcctggcacaacagtggcttcccccagagcaagtggtctgagagagcgagtgaggaggaagccacaactacttttatgactgagccctggaagccatattctttcacttccagagtatcatactagttatacaggtcagtcctgtttggtgtgggtcccagggactggacaagggcatgaataccaggaggtataaaaatcattggagtgagtggcagatcatggaggccagctgccaaatgtcctaacttgtctgtttcctcatcagtaaaacagggaccatctcccacctctaggttgttggggcctccaaacgagagtcatcaagaaaagccatggaggctgggtgccgtggcatctcaaagtgctgacctgtaatcccagcactttgagacaccaaggtgggagggtcacttgagcccacgagttcgagaccagcctgggcaacatagtgagaccccatctttacaaaaaatacaaaaattagccaggtgtagtggcacacccttgtagttccagctacttgggagactgaggcaggaggatcacttgagcctgggaggttgaggctgcagtgagctacgactgtgccactgcattctaccctgagtaagaccctgtcttcaaaaaaaaaaaaaaagccatggccctggagcctagcacatactagacgctcaccaaaatgagcttctgtattatggcactttctgtggaatggcagagggaccaggtcaccctcaatgagccctgttgaccacatgggggcaaaatgccccttctttcagtgaatggggactaggaacaggcactccttttttttcttcttcttcttaaggttttaaacacctaatttattccgtccattagatagattttgtagatttaatcattttcacagttggtggctcattggatactcaagataaactccaaatgaaagtataatggtgaggacaaatgagttttcacaccacaatggcagaaacttgcttgggaagagagtttaagaggaacaaaaatacatacagatataatttttttttcctcggcagctgcttttgctgactccagtaggttaccacagttaatttcaccagttttgttcatctgtaaaattgcataaaagtgacatttttgtgctcattatagcaactgctgatttatggctggtaaatgaagagctggtcccttttttgcgggactctccgagtggcgctaagtgcccatgaaattgcttgtataatgtagtttaaatccaatctcggagaaagattcccccgttggccaaagtgacatttccattctccacaccgagtttattttaggccacttaggaggaggctgccccgggcagagtcgggatgggggtccatggctgggtccacttgcccagccccagtgaggccagatgaacggagagccacctacttcttcactccctgctgccctggccaggtcagaccacacccttcacccagggcagaggcaaataagcccactgaagctcatttgcctaggctcataggcctgcccatgccttaccctgcttaaaacctcccatggctgcccagtgccccacgtcggggcctctccccctttggccctgctgacagttgggactggacccttttctgtggcagagctgtcctgtgcattgtaggatgtttagtggcatcccaggccatgacccacccgatgccagtagcacctctacccctagctgtgacagccaaacatgtctctacacacagccagagtgccccgtgcagtgagagccgctttcctgcagcgaagaggccctcccggccggccacctctcttgggcttctctctgcaagcctgccccggtgcctctctcctcccgagtcatttgcagttcccaccctgactacttctctgcctcagggcctttgcctgggctgtttactctgcctgaaatctgtttctccctcccttttcacctcttctaccagtggcccaggacttaaccaggatacagttccttttgggaagctgtctctggacccccatgtcccgccaccgcctgttcctctccatcccatttcacttggattggttgtgagcccacgaggtgtcagggacgatgctttagaaggttgggacatggccagcagccttctgatcagtggggaggtagcagggtctgcactctatccccagctgcgatgccagtcccacctgtgcctgtctgaagggtggcatgagtcccctgccccttttctgggagggccctttctctgggcagatggggaaggtattaatactcacgctcacagaacaccagcttttgttaacgccatctaccgcacatgacccgtcaaaccctcccagccatcttgggaagtagtattagcagtagcatcaccccattttacagatgaggaagcagaggccgagtggtgaagctcctctcccaggctcccctgaaagtaatgagctccaagcacctatcatgtacctcaccccctactgagcccccggcgcctccattccttgaggccaccttggagacctggcatgatcatgaccctcattctacaggtgggaaaacaggctcagctgggcaaactacatgcccagggccattccatctgcctcatggaactccaccaccaccactctccataccccctcagccccggaaagctgtgggctgcccttgggaatgtctcaggaccagggaggggctatggatgggggcaggagtctgcccgccatggccctccttccccatggcagggccagttgtgtccacttatagtggggacagtcagcctgtagcacagagcgtacccttcagccccatgcaggcggctcactaaaaaggcagcagcagccatgctggccttacaggtgaacagtagactcaaggaggggccaggaagcaagaggcagcagctcgccctggcgctaagccccatctgccgtgttcacgtagtagcacacttaaccagccaatgaggtgggcagggggtcatcatcccgtttcacaggtgaggaaggaaggcatacggaggataaaagggttagaaggaaggaatgtcccccagagtggtgacagaatgaaagatgacaccaagcactggcaggttgtggggccactggaactcctgtgctctgcgggtgggagtgtagcctggcatggtctcacggataaatggtcaggcattttctcccgaagccgggcaggggcatctcccctgtgacctagaaattccattcctgggtatatttccaacagaactctgcatgcactaggggccatggcactgtatttatttacttttatttttttgagacaaggtcttgctctatcggccaggctggaatgcaatggcacagtcacagctcactgtagcctccaactcctgggctcaggtgatcctcccacctcagcctccaaagtagctaggactataggcatgcaccataatgcttggcttcttttttttttttttttttttttttcttataaagacaaggtcttgctgtgtcacccagtctgatcttgaactcctgggctcaagcgatccttccacttcagcttcccaaagtgctgggattacaggtgtgagccacctcacccagctagaaacaacccaaatgccatcaagaatagaaaggttgggccaggtgcagtggctcatgcctgtaatcccagcactttgggaggctgaggcaggaggatcacttgagctcaggagtttaagactggcctggccaacgtggcgcaaccccgtctctgcaaaaaatacaaaaattagccaggcatgctagcgcatgcctaggatcacttgagcctaggaggtcgaggctgtagtgagccatgactgcaccactgcactccagcctgggtgacagagcaagaccctgtctctaaaagaacagaaacgatgaatagattgcggcatagtcacacaacaaataccatacagcgatgagacagaccagactactccccacacagccacctggatgactctcacatagtatgaagtgacagaagccaggtgcaaatgagtacatactgtagaattccatcttaccacatacacaaaccaggcacaaccagtccatgttagaagtcaggatagtggttagcgtggtgtggttagagactgggaggggcccagggaccctacaggggattagcaatgtcctgtctcctggcctgggtaccataaaacaggtgtgttccttttgtgaaagtccatcaagcttatgatgcaggcagttccctgcactttacactgaaattcgaagtttaaaaatgtagaaggaataaggagtaaaatgaatgggaaatgagtggagggggcgggactcgtgagccctgtggggagaggttggcatggcctcctgatgggccctcacacctgctttcctcccacaggcgaggcggtggccagcgccatgcattcctcccgctacccgagcccagcagaactggacgcctatgccgagaaggtggccaacagcccgctgtccatcaagatcttccccaccaacatccgtgtgccccagcacaagcacctcagccgcacagtcaatggctatgacaccagtggccagcgctacagcccctacccacagcacaccgctggctaccagggccttctggccattgtcaaggccgcggtttcctcctccagcacggccgcaccagctgggcccgccaaaagtgtgctcaagagcgccgagggcaagcggaccaagctgtcaccggccgccgtgcaggtgggcattgcgccctacccagtgcccagcactctgggtcccttggcctaccccaagccacctgaggcgcctgctccaccacccggcctgcccgcagccgccactgccgcctccgtcatccccctgccgggccggggcctgcccctgccaccttccaacctgccctccatccacagcctcctgtaccagctcaaccagcagtgccaggccccgggcgccgcaccccctgcctgccagggcatggctattccccatcccagccctgccaagcacggcccagtgcccagcttccccagcatggcctactcggctgcagccggtctgcccgactgccggaaaggcactgagctgggccagggagccacccaagccttgacgttggctggggccgccaagcctgcagggtacgcagacagcggcctggattacctgctgtggccgcagaaaccgcccccaccgccgccccagccactgcgtgcctacagtgggagcacggtggccagcaagtcccctgaggcttgcgggggccgggcatacgagcgggccagcgggtcacccctcaactgtggcgtggggctgcccaccagcttcaccgtaggccagtactttgcggccccgtggaacagtgtgctggtgacacccaccagcgactgctacaacccagcggcggcggtggtggtcacggagctggggccgggggcagcccgggagctggctgggccccctgcagatgccctctcgggcctgcccagcaagagtgtgtgcaacacatcggtgctgagcagcagcctgcagtcactggagtatctcatcaacgacatccggccgccctgcatcaaggagcagatgctgggcaagggctatgagacggtggccgtgccccggctactcgaccaccagcatgcccacatccgcctacccgtctacagataaggcctgccctgcggacatacggacatgcggacagggcgcagagccgggaggcaggccgcagaacagggtgggcggctcgcaggggcgctcagccccaccctgtgcctgctgatgcccacaggggagccaggctggctgccgcctcgctgtggccggatggagggtggcagggcaacctcacataccaaggcccctccccaccatcggttgccccaggacacagtgagggcctgggggcagccactgacgcccatgccttcctttatctaagctggcagaggcagggagagagaaaccactcaaaaacaggaatggttctttctgggcctcctgggacaggggcccaggccaaggtggggtgcaggaggaaacaggcgcaccagagtcagggtgggggcagggcagcccccccaggggtcaggcagctgtgtctccccacactggctccccagtattctggaaaaggggtacaggaggccgataggaagtcactgggcccaaagtgtctccccaccagccaggtgaagaccactctgacagaggctccagggactataccagtccccctgttcctccttcccctacccccaccattccttcctaacacagagttgcacccccatccccattctccaaaccctggactaccatattcccccttccctccaatacatcttatagggctgctgggtacagttgttcaggctgtgcactgcacaagggcaccttgtccaaggagacaccactttcacccaaacttgtatatttattacaattttctgcatcttgaggaaggggcgtcattttcctgttcgcacaaaggcaccacaggggctaacagtgggcctgcaatcttagatcccatccttgccttcttcgagggatctcttgggaccctcctggttttaactgggaggcccagaccaactcctttcctgcaaaccaccctccaaggcctgtcccacacgatcaaggcagggaaagataggcaggagtcccctcacgaagtcctcaagtcctggcccctctggcgctctggaagcggtactgtatctctctccaaggcctggtcaagcactaagtgcatttacaaatctctgagaatgttttttttatactaaaattgaccattatattctactgtgagaagtgcagtctgcactatattgttttaaaaacgaagagaaagaagaaaaaggaaaacacagatggtgtctcagctgtcgggttgcttttgtagctcttgttttcgttttctttcttcctccccttaggagtgaaaggggctgtctcctcccagctgaccaggcttgcagcccgggagggaagcaggccaggaacctccgggtacctcctgtgcgtggagcatcctgccctcagtgcttcccctattccagctctttcaagatggacattgtcatttagcacacaggctgatggctgctaggtcacggccatcagtcgatccctagagcagcagagacagaaccaaacgggggccctcttcctcattcccttcatggtggtctcggcgggggcatctcccctccatcacaatttcttcccagctcttccttgtgcctggcatgctccaaggggccatggtggcagtggggctggggacaggccacagtggctaggcagcagccatctccatggccaaccccatctcagccaggccagacaccccagtgcccacccaccccctgctctggtgcctggggatttgcaggagaccactgctgccccagggagctcagcatttattaggccttggctgtgcaccaggcattttcctacatactgtatcttgccaaagcctcacaacacccttgcagggtgggaggcgttcgagaggaaaaaactaagacgcgtagtgatctgtgcgaggtcacacagcaaatctgtgggaggctagggttcaaacctcacagcatggactcttccctgtgtcccgttcctgccttcgcctcctcccagctcttctctcccagcctcctagcccaatatcagggccggaggcactggagaacttccggctaaggcaggcctcccctcccattcacagagccctgccagggtggctggcaatggtgaagtccagggcagagatggggacagaggggacgccttggattcgactctgtggtgggtggtccacctccctgagaccaggcatccacgtcgggcagcacatgctacccagtccacagaagaggaaacagaggctccgagaggaagggactgtgtccagggcgggacccaggcccttctgcactgggtcaatgagccaagcacatcaccccagcccctggggagcaggagccgggccctgcagggtgaggagctgggaaaagcagagctccatggaaggcaaccgggaatcatcacaaataggacataactagtataaactgcaattgacagagtgcttttctgacctcacttgagtctatcaggtagatgataaaatcaggcccattttacagatgaggacacaacctgaccaacggccacgaggatgttgagagggagcgaggtgttctggctgcaagccccacccccaccctcattcataatcaaagcccgcctgggtgcagccggaacccgggggagcctggacggggcaagcccagcaggcccagcctctgcagtgagctagacttgggttccaatcctgataatgccaccgtgagtgaccctaaccaatccatttcccaagggggggcggcaccagaaccagagatggaattcaagcagacaaaagcacagtgtgagcactcggggagggagtggggcaggaaaccaaggtctagggccaggtgttacactgggaggtggcctatgtctcagctgttcccaggtgtcaccactggggccacccaagcaccaacttggtcacccaggtccccatgtccttggtcaactgccaggcgtacccacactggggcatcaggagaggggaaacgggagaggctggagccactctccatgcccggtccctcatatttggatatcagagcaaaggatgcacctgctatcctggaaaaacctcctcatcctccacagggtggggtctgtgtgcgtggcaatgtaggggcgcatggcacagtctgggtctgggcccaggaacccagctggggctctagccctgactacctgtgcctccttgggcctcagtttccccatctaggaactgggctggctgatctcaaagtgccctccggtggccattctagcatggtttctttatacaatcaatcacctttgattaccacattgatggggggaggacaggtgacgaaagcattgctatcactgctacaattactgagatcccacacttaactacaggcagaccagataccaggctcggggctaaacgttacttgtgcctcacaaccactcggcgcaacagaggtgcatgcacccacattacagacaaggttagtgagacccacagaagggcaatcactttgcccaaagtcacacagctgaggatgaagaatggagaagtggctgggatagaacacaggcctgtctgattctgagtcctagttcccagctgcaaccctttgcagagaatagaaaacaactgtcaaccgccaaatgtggccaatttggctccagaacccaggcacagccttggatcccagagccccaactgcccagacatcccggtgggtgagggagaaagagaggagaagccaccatctcatccaggccccgggcaggagctgcagtccttctctaggtctctgttctgacactaggatccttctctctctacttagctgtcctgggctcacaccctttaccacggagctgtccaatacggtagcctggtgtgcagaaaacctcggctatcacttcctgtcatagtgaccattagaagatcaccccaggtcagagacaggtgaccttacagagagatcagagctgccccagaaggccacgggggctcaggcgcagatttggatagaggaagctatgttagtagacactcacctttccagggtggctctgtgttttcttcactcatatccctgtctttatatcacaaccccatttctggagcggggaaactgagacaagttccaacttctgaacttgccatccaaacagcgactcctaactttgccctactcagctccctcggctgcagcctggactcctccacgcgcagctccacgtgtgcccagcaccactgcgcctgcccatccctcccgggcgctcttaaagggcccacaccccgtcccacccccaacgttggccggagaaggtggagtccagccagcgcgataggtgagagcaagggacgaaaggttttctgtttaaattgccaccatcaccagctcgccagcgagtggcagggggaggggaggaggcaagaaaacggaacttagtatcccactgactccacgtgtgaccctgggtgacttgtgtgcctctctgagcctcaatttccagatctgttgaaggaagtggtggcacctggaggagtgaggtggcatcaggtgatgtgtggtcaggatgatagggcagattcgtcctgtaagaggacccctctgagtgctgtgggatgtagttgtctgagggtcagaactcgttccatcctgaggctgtgtgcaggtgtgtgtgacctcaggcaagtgatcactcctgagtcatctatttcccaactgtaaaatgaggctccaacggggagctgtggctcatacctgtaatcccagcactttgggaagcaaaggctggaggatcacttgagcccaggagttcaagaccagcttgggcagtatcacgagacccctatctgtacaaacaattttaagattagctgggtgtagtgtgtgcctgtagtcccagatactcagaaggctgaggtgggaggatcacttgagcccaggaggtcaaggctgcagtgagccatgatcgcaccactgcactacagcctgggcaacagaacaagacctcgtctcataaaataaaatgaggctaatattttaatgtatgtaccatgtgaggtttaacttaggagacaggtggtcaaatcccctgggtagcacagagccattaggtaaaagacatataacaaaggtggagtattcccatccttgcctagtgcagctgacttccaagtcaccttggaaagtgggtttcccagtcaaaagagtttgagaaacagatgcctatcccggctcttggagatacacaaatcgcattaacatattaaagatgctaacagatcctgcaggcaagattcccttttaacttctttgcagtggcacagtctcggctcactgtaacctctgccttccaggttcaagtggttctcctgcctcagcctcctgattagctgggattacaggcatgctccactacacctggctaatttttgtatttttagtagagatggggttttgccatgttgaccaggctggtctcaaactcctgacctcaagtgatctgcctgccttgaaggcctcccaaagtgctgggattacaggcatgagccaccacgcccagcccccttttagctttaacccagcatttccctaacttttttgaccacctaagtttttgtttccacctatttacaccccatggaacaaacaagacttcaggaaatgctgagtcctgcctcttgtattgcaattggggaaactgggtaagtcctttctcctctctggacctcagtttccccaattacactgcaaggactcataatgagtttgtggcagagcaaggactggaacccaaccctgacctgggtggctgggtctcatttctagtacgccctaactggtcctgtccctcatattgaattaggcacaaaagaaggggaaggccctcagggaagaggaagaagccacatttgagaagtaggggtgagtactcttattttgaaagagaggaaactgaggttcagagaggggaggcaacttgcctgaaggcacacagcaacttggtcctgaacgctccagaggcagtcgaggccaccttctctccttcttggggtgagggtacgagggtgggggtgggatatttcctgtctcaaagcctcagggcacacccaacagggtgctcacagggagtcttcctgatcacatccccaggttccaagcttccttctgaacccctctgaggaggcccctgagtgtgacaacagcggcccctggtgaccaatctccgggacctcagcagccttaccctgtgctagccaagggcagatctgtgggatccaaggggtgtacccccaaaactaagcggtgccaacagaacggggactccctaatgtcactaagaaccttgaggtgctaagaagaccctaagctgagatctgcggacctgggtttgagtccccgctccaaaccccaacctctcctgcccttacctgttagcagccattacagcctgctgctatggagaaatagaatgtgtgcctgctttggaaaggccaaaaacactaagtatatttaaaaaaaaaaatcctgccacgccctagaaaggttcaactccaccacatccaggctatgtgtccttagtcatgggcatttacttgattgggtctcactttcttcatctgtaaaatggggatacaaatttgtacttgtatcagcatgatttgggccaaatatcagaaaatccccctgactcaactggtttaaatgagaaagaacatttattctctggaataatcataagaagccttaaggcagggtggcctcacagttggttaaagcagcagctcaatggtgtcatcagggaccaatgtccttttcatctttgtgttctgtcaaggcccctcaggggcacaaagtggctgctgcagttccgggtatcacatccagatgcaatagtgaccagcaacagagaggacagtcttttcctagatttctcttactttcccagaaacttttcccagaattccccctcccccagcagacctccccgcttgtctcatggggcaaaactgggtcacatggctattcccacaccgatacctagtaagggaaggagagtcatggtgattggctcaggtgttgtaacaaagagggggcatgatttctaggatggtacaaacactggttcatgagctcccgcacacggttcctgagattatgaatcccaaacactgagcacggcgtctaacacatggcagttgccttatccatattgcttccccctttctctgattccctctaagaacacaagactcccagcctggcctctcctgagccagccttccacccctcaatcctggggcttgggtctccaccagtcagtgcctctcccatcctgacctctggctccatcactgccctccctcttatttctatctcaaaagcttgggatgaacaaagatcacttcgttgtcctcagtgacactggattcctaaagaataaaagataggagatgctagattcttatataaatgctttcaccagggagccaaaaattaataacagcatgaacagaggcctggagtatttaaccactccatccagacaactgaaatgatccgagtacaccgttatctgggcgaggtgcggggactgactgccgactacgacattatcacattcggaaatgtcagaagcatgcattttgcagggagatgaacggtgtggctgaatatggcttttgattaaaacaaaattcccagcattcatctaaaacaataataacagctaataataacagggcatgtaataatgaaccattcataggcataagaggtaattgttcaattaagatcccagagtttcagagactgtcttttctgatggggtccctttgtttttgcctccagtagcactaattctttcccagtagtgctttaaacttgggaagaaaaaagccctcctgtcaaatatgacatacaagtgccttatcattattaaatacacatacatgcacacaataagcagtccttgttggaataaagttaggggtatggcgctctcagtgaatgctgacaggcttgggagctccgtgaaagtgacaggcaagagcctgggccttcactgcagaagtggtctggcctcgttacctctcactgcccagggaccagagcgctttctctccagcatgggttctgaagacagaatgcctgggttcaggtcccaactccactgcttagcatccaggtgccctgggcaagagtcttcatctctttgaacctgtttcctcatctataatacggaatatagtagacatttagtttttttggcctgcctgtgttctatttactctctcttctagtgtctgtaaccattagctattgctgcctgcacttaaaacacacacacacacacacacacaatcataaaaaacctgtggtatccaaaaacattaatttctcatgcagctgccgggttcctctgatctcagctaggttgcctggggtgacttgggtgtctcttatcctcttcctgagggctggccctggcatgtctgctaacatcccattggtcaagacaagtcacatgctcaaccccgggtatgggaaattatgctttgccctcggtgggaggacatcacaaagttagactgcaaagggcacacaggtcaggagaacggagaagggcatttaaactaaggatgctgcttttttacagtcttcagagacgatgaacctcctgtcacaggaggtatgcaaacagagaggtgtaggcttggtggtaaaaagggatcaagcgtggatatagagttgggataaattaatgattcccaaatatcaatcatttctataacatagtcataattttccccatgaacgtttattcatttaatatagttccttaaatcatctaagtattctttttttataagctatatttttattattaaatgacttgcttgtaaactacacttgagaccactactttatctagaaaactgtatcatttgccataaagagaaggctttattactctaaaaataaaatgaaattaaaatgttttttattttatttatttatttatttttgagacacagtctcactctgtcacccaggctggagtgaagtggcgcgatcttggctcactgcaacctccacctctcaggttcaagtgattctcctgcctcagcctctcgagtacctgggattacaggtgcacaccaccacacccagctgattttttttttttttgtagttttagtagagatggggtttcaccatgttggccaggatggtcttgaactcctgacctaaggtgatccacctgccttggcctcccaaagcgctaggattacaggcatgagccaccatgcccagccacgaaattaaaatgtttttaagttattcctagataccatgtccttccagaggttctgagcctaaggcttttctctatttgaaaacaaagattagtgaatgttgggaaggcattcaaacacagaagcaccaaactgagaccttgatacagtcagggaatacacagaactgaaaagagaatatgggttttttaagtgtgatcctatgtccattgtatcacctgagaatattctggcataccaccagcgcatgtcccacactttgagaacattgggaaaggtcatctttaagattttactgcaacaaacaaaatcccaatgacttgcagatttttaagttcccccacacagctatttagtcatagtcaatatccaaatcattgaatatttagaaagatcacagttggaaaaacttactacatggctaaaagtgtactcataggaaaattcatagccaaaattatttcattataaaaaaataaaaataattagccaggagatagtggcatgtgcctgtaatctcagctactcaggaggctgaggcaagagaattgcttaagcctgggaggcggaggttgcagtgagccaagatcatgccactgcactccagtctgggcgacagagtgagaccctgtctcataaaataaaataatgaaaataaatgaattaaacactcaccttagaagttactgagtctttttgagttgggagggtgttttgattttgttggcaggcccatcccatccgcccctagagaagtgacctcttcacagacccagaatgagccacagccattcttgatgacaatgttggggtggagggtggacatttgcaaaaaggactgtagtagatgctactggttgcctaggcaatatcaattcgcacatcctctttctcatagaacccagacctggctggagtcacttccttcctccatatcgccatctgcttctttaggccaattgctgtttcctgcctgctgattggctgaagcgtgggacacatgacacaattctggtcaataatacaagaggagaggccagctaggacacttcagggaaaaagagacaggaagagctgtcttcccttctactgaatgagactgaatctggatgtgatgtctggatcaagggcaccatcttgtgtccttgaggaaagctggtgtaacaaaaaagccagcacaccaggcgggcgttgcctcgcacagtgcctgacgcgtggttggaatccatacttaaatgctgaaggagtacatgagggacagaactgggtccttaatgaatcacagagaccctgaatttatcagccttaatatcctccctaacttgggatatcctgctgacacaattaatatccttttttttcccagccagtgtaggttttctgttacttgctgcccaaatcacgtaactatatgaatactacagccacaattctctcttcttcctcactgatttgggtattgattatttatgattcaactgctgcctgggggaatatttttttttttttggagacagagtctcgcttattgcccaggctggaatgcagtggcgcgatctcagctctctgcaacctctgccgctgccccctcaaccacccctgatggggctcaagcaattctctcacctagctagaattacaggggtgccccaccatgcccagctaattttcatatttttagtagagacagggtttcaccatgttggccgggctggtctggaactcctgacctcaactgatctgcccacttcggactcccaaagtgctgggattacaggcataagccaccgtgcccagcctgcctgggggaatttaatgggtcccaggaatcacttgatcatcgaaaagcatgtgcccattttacagataaggaaactgaggctcagagcatttctaatctacccacaaatacccagaagaatt

SEQ ID NO: 901 - DNA, 3452 bp, Homo sapiens
gagagcccagcgcgcgcggcccctgctgcggcttgcgagctcgcacacccggtgcacagtcccccgggccgtcctcgtgtccgtcctgcgccactgggatcggctgtttctcagcgccgaggcccccgaggctgcatccgagcttgcgtcgcccgctgccgccgccgccgccgctgttcgccggcttcccctccccccacacccggggctcagagcaggaggaggaggggccggtgcattctcgccgctgttctttgcaacctgcaggggccggtgtatgtccggcgaggagccggggccgctgcgggtgcgtgcaacccccgaaggagacaatccctccacctcggggcgaactcgggggctgcaagccgcgggcgggcgggcgagcgagaggaagcaacaaagacaggctgcagctggggctggcgaaaggggccgcggccgccgggctcccagcgcgggcggagagggcgccctgggagcggcgcgggccgagctgcagccttgagcggggccccgaggggaggcgcagcgccgcccgccggacgtggcgatcacgggccccggcgaagatgcgtcgcctgagcgcccgcgcggcccccgtccggggcgggcgtgacccctgctgaacggagacctcccctcccccccgacttcggacggcgcaggccggcgccaggatagccctcaccgacagcgccccttcccacccggagagaggcatcgacccccaaggagggcttcctcaggcagcctctgccactcctgcatggctgcgacccgtcgagcggagcgtcgtggtagctgagacctggtgcccttcgacggcctggctgatccgggacccagtcgcagagcgcaccccactggggacccccagctcagccatgctggcctgtctgcagaggacccagaacgccccgggccaacacctggcctgcccgagcaagagcctggagctgcgcaagtgcgaggcggtggccagcgccatgcattcctcccgctacccgagcccagcagaactggacgcctatgccgagaaggtggccaacagcccgctgtccatcaagatcttccccaccaacatccgtgtgccccagcacaagcacctcagccgcacagtcaatggctatgacaccagtggccagcgctacagcccctacccacagcacaccgctggctaccagggccttctggccattgtcaaggccgcggtttcctcctccagcacggccgcaccagctgggcccgccaaaagtgtgctcaagagcgccgagggcaagcggaccaagctgtcaccggccgccgtgcaggtgggcattgcgccctacccagtgcccagcactctgggtcccttggcctaccccaagccacctgaggcgcctgctccaccacccggcctgcccgcagccgccactgccgcctccgtcatccccctgccgggccggggcctgcccctgccaccttccaacctgccctccatccacagcctcctgtaccagctcaaccagcagtgccaggccccgggcgccgcaccccctgcctgccagggcatggctattccccatcccagccctgccaagcacggcccagtgcccagcttccccagcatggcctactcggctgcagccggtctgcccgactgccggaaaggcactgagctgggccagggagccacccaagccttgacgttggctggggccgccaagcctgcagggtacgcagacagcggcctggattacctgctgtggccgcagaaaccgcccccaccgccgccccagccactgcgtgcctacagtgggagcacggtggccagcaagtcccctgaggcttgcgggggccgggcatacgagcgggccagcgggtcacccctcaactgtggcgtggggctgcccaccagcttcaccgtaggccagtactttgcggccccgtggaacagtgtgctggtgacacccaccagcgactgctacaacccagcggcggcggtggtggtcacggagctggggccgggggcagcccgggagctggctgggccccctgcagatgccctctcgggcctgcccagcaagagtgtgtgcaacacatcggtgctgagcagcagcctgcagtcactggagtatctcatcaacgacatccggccgccctgcatcaaggagcagatgctgggcaagggctatgagacggtggccgtgccccggctactcgaccaccagcatgcccacatccgcctacccgtctacagataaggcctgccctgcggacatacggacatgcggacagggcgcagagccgggaggcaggccgcagaacagggtgggcggctcgcaggggcgctcagccccaccctgtgcctgctgatgcccacaggggagccaggctggctgccgcctcgctgtggccggatggagggtggcagggcaacctcacataccaaggcccctccccaccatcggttgccccaggacacagtgagggcctgggggcagccactgacgcccatgccttcctttatctaagctggcagaggcagggagagagaaaccactcaaaaacaggaatggttctttctgggcctcctgggacaggggcccaggccaaggtggggtgcaggaggaaacaggcgcaccagagtcagggtgggggcagggcagcccccccaggggtcaggcagctgtgtctccccacactggctccccagtattctggaaaaggggtacaggaggccgataggaagtcactgggcccaaagtgtctccccaccagccaggtgaagaccactctgacagaggctccagggactataccagtccccctgttcctccttcccctacccccaccattccttcctaacacagagttgcacccccatccccattctccaaaccctggactaccatattcccccttccctccaatacatcttatagggctgctgggtacagttgttcaggctgtgcactgcacaagggcaccttgtccaaggagacaccactttcacccaaacttgtatatttattacaattttctgcatcttgaggaaggggcgtcattttcctgttcgcacaaaggcaccacaggggctaacagtgggcctgcaatcttagatcccatccttgccttcttcgagggatctcttgggaccctcctggttttaactgggaggcccagaccaactcctttcctgcaaaccaccctccaaggcctgtcccacacgatcaaggcagggaaagataggcaggagtcccctcacgaagtcctcaagtcctggcccctctggcgctctggaagcggtactgtatctctctccaaggcctggtcaagcactaagtgcatttacaaatctctgagaatgttttttttatactaaaattgaccattatattctactgtgagaagtgcagtctgcactatattgttttaaaaacgaagagaaagaagaaaaaggaaaacac

SEQ ID NO: 902 - protein, 452 aa, Homo sapiens
MLACLQRTQNAPGQHLACPSKSLELRKCEAVASAMHSSRYPSPAELDAYAEKVANSPLSIKIFPTNIRVPQHKHLSRTVNGYDTSGQRYSPYPQHTAGYQGLLAIVKAAVSSSSTAAPAGPAKSVLKSAEGKRTKLSPAAVQVGIAPYPVPSTLGPLAYPKPPEAPAPPPGLPAAATAASVIPLPGRGLPLPPSNLPSIHSLLYQLNQQCQAPGAAPPACQGMAIPHPSPAKHGPVPSFPSMAYSAAAGLPDCRKGTELGQGATQALTLAGAAKPAGYADSGLDYLLWPQKPPPPPPQPLRAYSGSTVASKSPEACGGRAYERASGSPLNCGVGLPTSFTVGQYFAAPWNSVLVTPTSDCYNPAAAVVVTELGPGAARELAGPPADALSGLPSKSVCNTSVLSSSLQSLEYLINDIRPPCIKEQMLGKGYETVAVPRLLDHQHAHIRLPVYR

SEQ ID NO: 903 - DNA, 2731 bp, Homo sapiens
actttctaaatcacagtgcctgtggccggatgacatggagggagctccctgaccataggaggggttagagacacgacgcccctctaccctcactcacagcagaggtggaaagctggagactgacccagtcgcagagcgcaccccactggggacccccagctcagccatgctggcctgtctgcagaggacccagaacgccccgggccaacacctggcctgcccgagcaagagcctggagctgcgcaagtgcgaggcggtggccagcgccatgcattcctcccgctacccgagcccagcagaactggacgcctatgccgagaaggtggccaacagcccgctgtccatcaagatcttccccaccaacatccgtgtgccccagcacaagcacctcagccgcacagtcaatggctatgacaccagtggccagcgctacagcccctacccacagcacaccgctggctaccagggccttctggccattgtcaaggccgcggtttcctcctccagcacggccgcaccagctgggcccgccaaaagtgtgctcaagagcgccgagggcaagcggaccaagctgtcaccggccgccgtgcaggtgggcattgcgccctacccagtgcccagcactctgggtcccttggcctaccccaagccacctgaggcgcctgctccaccacccggcctgcccgcagccgccactgccgcctccgtcatccccctgccgggccggggcctgcccctgccaccttccaacctgccctccatccacagcctcctgtaccagctcaaccagcagtgccaggccccgggcgccgcaccccctgcctgccagggcatggctattccccatcccagccctgccaagcacggcccagtgcccagcttccccagcatggcctactcggctgcagccggtctgcccgactgccggaaaggcactgagctgggccagggagccacccaagccttgacgttggctggggccgccaagcctgcagggtacgcagacagcggcctggattacctgctgtggccgcagaaaccgcccccaccgccgccccagccactgcgtgcctacagtgggagcacggtggccagcaagtcccctgaggcttgcgggggccgggcatacgagcgggccagcgggtcacccctcaactgtggcgtggggctgcccaccagcttcaccgtaggccagtactttgcggccccgtggaacagtgtgctggtgacacccaccagcgactgctacaacccagcggcggcggtggtggtcacggagctggggccgggggcagcccgggagctggctgggccccctgcagatgccctctcgggcctgcccagcaagagtgtgtgcaacacatcggtgctgagcagcagcctgcagtcactggagtatctcatcaacgacatccggccgccctgcatcaaggagcagatgctgggcaagggctatgagacggtggccgtgccccggctactcgaccaccagcatgcccacatccgcctacccgtctacagataaggcctgccctgcggacatacggacatgcggacagggcgcagagccgggaggcaggccgcagaacagggtgggcggctcgcaggggcgctcagccccaccctgtgcctgctgatgcccacaggggagccaggctggctgccgcctcgctgtggccggatggagggtggcagggcaacctcacataccaaggcccctccccaccatcggttgccccaggacacagtgagggcctgggggcagccactgacgcccatgccttcctttatctaagctggcagaggcagggagagagaaaccactcaaaaacaggaatggttctttctgggcctcctgggacaggggcccaggccaaggtggggtgcaggaggaaacaggcgcaccagagtcagggtgggggcagggcagcccccccaggggtcaggcagctgtgtctccccacactggctccccagtattctggaaaaggggtacaggaggccgataggaagtcactgggcccaaagtgtctccccaccagccaggtgaagaccactctgacagaggctccagggactataccagtccccctgttcctccttcccctacccccaccattccttcctaacacagagttgcacccccatccccattctccaaaccctggactaccatattcccccttccctccaatacatcttatagggctgctgggtacagttgttcaggctgtgcactgcacaagggcaccttgtccaaggagacaccactttcacccaaacttgtatatttattacaattttctgcatcttgaggaaggggcgtcattttcctgttcgcacaaaggcaccacaggggctaacagtgggcctgcaatcttagatcccatccttgccttcttcgagggatctcttgggaccctcctggttttaactgggaggcccagaccaactcctttcctgcaaaccaccctccaaggcctgtcccacacgatcaaggcagggaaagataggcaggagtcccctcacgaagtcctcaagtcctggcccctctggcgctctggaagcggtactgtatctctctccaaggcctggtcaagcactaagtgcatttacaaatctctgagaatgttttttttatactaaaattgaccattatattctactgtgagaagtgcagtctgcactatattgttttaaaaacgaagagaaagaagaaaaaggaaaacac

SEQ ID NO: 904 - protein, 452 aa, Homo sapiens; identical to SEQ ID NO: 902

SEQ ID NO: 905 - DNA, 50691 bp, Mus musculus
gccctctaccaggagggttatggtgtgtactgaaggagacaggaaataattcaaaactcagctgctgccacagcatctatcagtcttcagctgctgccacagcgcggatcccagcggctccagccacccgcggcacacgctggccacctgctcaagtctgtgctgtttgtccacacagcgattctgccaggctgcgctcagtgggaagtgggcctgtgcacactaaatccgtatcatcacagaaacgcttttaaactcccaaagaacaaatggctctctccttcagggctactctacaactgtcctgactggctcacagggcagatgagtcctacggaaccagtctttgttttttttttttaattttatttttaattgtatgtatgcgtacatcaatgtacactgagtgcaggtgccaacagaggccagaagggggtgtcaggtccccggagctggcgttagatgtgccgtgagtcatctcatgagccatctgcaggaacagtgtgtgctcaatcactgatccacctctccagcccaagtcatcgctctcttcttctttttattcttcttcttatttttacacacacaccctttacacaaggactcactgtagcccaggctgacctggaactcactatatagaccaagctggccttgaattcacagctgtctgcctgtctctgcctcctgaataccggggactaaaaaaagatgtgtgccaccacacctggccatgttttttatttggtaaaaaaaggaaactatttactcactaggaaaatcacttacatctgtgcagaattagtattctgaattgtgcacacgctgtcttgagtgagcatctagttcaaagcaccgctcaaaaaactgtgatgtgcatttttacggcatctcgtagaaacagccaaggcccacaagaaggcaccgctcgcggtgtaacagacacggctgtgctacagctctaggtgcactttgccctccagccttgaacctggacatctgaagcagtcagcctccttcctctgctctatttcagatgctaggttctctagaaaaccttctttgaaatggctattattctcaagtaaagaacttatcaaaatctatgtgaaaactgtaccgaaaaagtacaaattaattaatcaattaaatgaaaatgaaaataaaaggggaaaaaaatacagtttcttagaagcgtgttttccttttgtccagtgtgtctgagaggagtgaatgctgtgtaagggagaaaggtcagttagtcaaaggcacttgcaaaaggctgcttcttcctcctgacatggctttaagggaagcggcccatctcacggccccacagaaggcagagcgcgcccaccttactgagatctttggccgtcacgctgtcgtcctcgcggcagggcaatcggtggacgaacgctaacatctgatacttggctctgatgaattctgctttattggggctggtttggaaacaaataagaacacagttcacttaacagctctgacacatttctcattctttgtgctgtaagaagaggaagtgacacccccccccccccactggacagtaagaagggcaaagctggactccactgcagcagagtcaaaggcctgagctgataagagaacgcctgaacttcccagcgcctctcttccctttacctttctcaactgggcaccctgaggaagcagcatctaaccctgtgtcacaggcccggcactgccagaacgctgcggccagcagacagagcgctcggtttcatctacctcatcacccggagtcaagctccaagccctggactccaactggagaaatcactaacttcaattgggtgagcatccaaagttatggtccccctgcctccctccccctgccttcctcacagcaaatgcccaggcatagcccacagcccctttggaggctgatcaaaatagccacactcctttccacagggccacttgctgagaagaaatagaagttataaccactccactcactgaactttgtcctgtgggttagctttccgcctcccactcatgatagaggcagggtccagcagagagtgttcccatatagagttagcaccattgttgtacaaggtctcaaccatctgaaaacaaggagtaggagaggacattttatcccacaaatagtcaaaaacaaccagtaacaaaaatgaaaaaacagtgctgcactaaaaacactccatatctggggacctcccgccactgcgtctgactgcacagtgagactggggaccgggccgtcactgttcctgactggcagtgagaccttggagctccacatgggagccagctttgtgtgtaggatagcccaatcccggctccttggcacacacctgcctgaacacacgccgtttaccattgtgtacaccactcactcaatgcttttcattaaattcacctatttaaaatatcttgttaataattatgttactttctttgtacatgattaaagtaatgctataagcacacgtctgcgtgctaagctctctcacaccccactgtggtcctgacccccccacacacacacacacatttcagagtctgctgccttaaagtcaaccctagcattttctttttttttgttttttgtttttttttttgtttgtttgtttgttttgagacagggtttctctgtgtagccctggctgtcctggaactcactgcagaccaggttggcctcgaactcagaaatccgccgcctctgcatcccgagtgctgggattaaaggcgtgtgccaccacgccctgctaacattttcaatcattcatctctggaccatctgtaaattctaaagctgtaaacaaacacagtgtggtggaaggcgctagccaacccttttacgagaaggggcctttggacacttctaacagaactcacagtgtggtggagggtgctagctaccctttcacgagaaggggcctttggacacttctaacagaactcacaatgtggtggagggtgctagctaccctttcacgagaaggggcctttggacacttctaacagaactcacaatgtggtggagggcgctagctaaccctttcacgagaaggggcctttgaacacttctaacagaactcggggatttatggttgttagctagcatttaaaggctgagccatctcttcagcccctaagtagaacttttaataaatctctctcaacttcctttccaatcaggactcctagagctacccggctgctagtgcagctctcagggcttctcatcagtaacccgaaccacttgctctggtcccttcgtttgtgggagtttaagtactgctgtgcagctgttacagctttagtaagatgtgtattaagacaaatatcgcaaaacacaggattaatccctgagttccaggagacatgaagactgtgtatcgcaaacagaagtaccgggaacatgacatcagatcccaaataagacaaagacccctgacaagtgttaggcatgcgatcaaaacacgctcactcaagtctctgcctaacagcaagagctttttaaaaacttcaaatgttgaagcaatttctgcggaatcccagtctatgctgctatcaaagcaggaaaaaaaaaaagttctaaaaatataggcaggtactcagaaatttgcctgttaatgaaaattttctggatcatctattacaatttataggaaagaaagactttaaaaaatgtctgagtgctgcagagatggctcagtgttaaaccaaacacttgctgctctggtagaagacccggatttgagtcccagcaccggtgtggttcacaacgctctgtaattccagtgtcaggaaatccagtgccctcttctggcctctgtgagcacacacacaaacacacacagacacacacaggcatacacacacacacaaacacacacagacacacacagacacatacacaggcatacacacacacaaacatacacacaaacacacacagacacacacacacatgcacacacacaggcatacacacacacacaaacacacacacacacacacacagacatatatatgaaatacatctaaaaaaataaaatgatttctgaagttgggcacggttgcaattacctttaatcctagtacttagcagaggcaggtggattgtctgtgagttcaaggccagctagggctatatagcgagactctgtttcaaaacaaaacacaacacaacacagcacaacacaacaatttctggtgataatctctctagaaagccaccaatgaaaacgcactagagaatttaagcttttatcgacacaatctattgatatatctgtctatgtataactgaatgtggggaacacaattatgttaggtaaacaaagaaaggacagacaatgacttcaacacagggcagcactttatactatacatagagagtaaacttttataagatttaagatgtatagtaggcagtattttagttgttaagcaacaatcactaaaatataattttccaattatgagaactcttcctatggtttacctggagcagggttggaggccatgctgtgtgtttaagatgcctcacttgggagatatggcgccccaggctccgatggacactgcaacattcgtcacatatgaaagttcccctatttactgacgcccaggaaggatctggaaaaagaacaacccctcagtggcaaggacaccaattggctgctgtgtacaggatggcaaaagatgagtgatgtttggtttttaagaaaaacagagcacatttttgttgttttatctgctcctcagcctaggaggctgatgatccccccacccggactgaccgctctgctaactaggttggcagctgcacacagcagtcaccttcctgtgcaggccagtctgcagcctggatgtgggtgcacgccacagactcgtgctctcaggggatgttggttagagcagcagattgagggagcaggggtggttgctccgctgtttgcttccagtgctggagactgagccaggggccttgtctgggctaggcaagcactctatgctgacctccatctggatgaccgcgtcgagtccctttttgagaataacagagctgtgtgatcctgacacacacacagtgcgtaacagtagctaaggtaaatggtgaacttattgctgcccagagcaggcagtccagacccaggtgctaacagaagccagaagagaactgcagaagcgtccaggcccccatgccccgggcaagcaagggtggctcattctgctcagagagacaatgctctatgctagcactgcagtttttgaccacctgctggatctgaaggaaggtacttcaaacgaacagacggaaaacaaaaatgatggtatttttaattgagtacaatacctttttcctttaaaatcccacaaaactgcagacaggagtaactcacactgggcgggtaggacggatctgtgtgagtaaactgagccctagaaaccccatttcatcagactcatgtggggtggcattagatgctaccccggctgcctggcctaagggttcagtttaaaattcttcaatgtccacaaaaatctctgaaatgcatgtagagcatctttaccacttttatgtttattccaaccctttcaaaccatttaatgaaaagttacgggatttcaatcaaggtgtacagtggttaagagggctggttatggagacaaacagtccatggtttgaatcccaaccctgccgtgccacctcttgtgcaatcatctgaggcaagctgcgtcttggagtgttctcactgaggaccaaactggaatagtgatgtatctatctcacagaagggacgatgtaaagaacaaaattagagtgtcatcttggcacaagaatgatgcatttaaaatgaactagattcattagaaacaaacaagaaatcagggctgagggtgtggctctcctagcaattgtcagggcctggctttgatccccaacacacaaaggcagacagtgaagcgtctcctctaaaacaaaacagaaagggtttcagccagctttaccataggtgctaccagccattctaaggagcaagggtaggaaacaggaggctttgcttgcagatgtgtgacatctctgcttctgcagcaagttattaatattgagactgaaagcgtgactttgctttttattaccagaggtccacagtactcttggggcaaactagtcaagaaaaggatgacaggatgacaacattttaacgcgcaccacacaatggtctccattaatcacttaaacaccatggaacagaagcccatggaaagaatacagacgacacataaaacttaagcttttacgagtgaagctgcgtgaagcccctccagttcatctagaaggcaggactttgttgttgttgttgttgttgttttgttgttgtttgtttgttttttgttttttcgagacagggtttctctgtatagccctggctgtcctggaactcactttgtagaccaggctggcctcgaactcagaaatccgcctgcctctgcctcccgagtgcttggattaaaggcgagtgccaccacgcccggaaaggcaggactttttaatcaggctccaggaacaacacaagtggacttcaaaagtatctgtgcccccacccatcttctgcaaacgtccaggagagtcaaatgtctgtctgagcatcttctgagaaggccttagcatgaggatttcaaaggagcctactcctacaggtaacctttcccctgagctgtgcacaaaaggcagcacctattcctagctgttcctcagccttcaaggtagcttcattctattcaaaacaggaagtgactcaagcctttctagatgttggcattcaagacctctaatatgaaacaatagaaaaggccccaaaacaccacaaaatggacaagacagtatcggggtggcaaggggaggcagcccgcctctaccacggaccaatccctggagaagtaagaagcaagcatcccaagaggaagttttaagttagacatgaatcaacggaacacaagcaagaaaagaaggaagcggaacacacaacatcgttagccaaataatagtttgtataaacgcggcttgcaaacaaagcatctcttttaaaagtgcctctgcctctccttatcttccatttgttaacctgtaggacccagggccatgaaataaccagtactggttaccaccgtaccacttaaaaccagtctctgcttccaaatgacaagacgaagagaaaaatctgttgcaagccgctgacgttcaatggcttaattaagactgtctattgaacactgctacaccaggaaagtcatctgatatttgacttcaaacccgaaaagtccaaggaccaaagcaagcacacacacacacacacacacacacacacacacacacacaaaatcaggatcgagacctgtcagttgggttccaattacaaagccagatccaatcttcaaatccaaatcctatctgcagtttagaacagttttggcggttcgaagtcgctgcgagtgacagtgtgaatctgaagccagactgtggctgaaggaactacaagggttttgaactgagttatcctacgaaaggagccgatccccggggaatgtccattgaccactgcgcactgcattggccatagtttccagcagtgggtgggggggaaaaaaaacccggaggaaatcaaggtttgagcaagagaactcatcggtccaaggtcacgcagaggcaaaatcgggggtggggggggggagcacgggacctcaaacttgcgctcccgacctggggcaggcagtctctccccttaggagcggccgcccggagcagggcagccctccaccctggggcccgtgaggcggcgcagcggacgatcgcgcactcgcgcgggcggggcgggagacggggaaggggaaacacctgcagcctagggccgcccgcgtctgactcctgtcacttggccttcccgggctgcctgtcccgtcccgtcccgtcccgtccggtcccgggccctccgcctctgtgctcgcccgggccgcgggagggagggagccccgggccgcgcggctgacaggcccgggacggtctcgcgcgccccggcagcccgggggtcggggtgactgggccgcagtcaggctcccgcccgcggggaccgccccgccaggggtcccggccgggagagcttggccagcgggggccccggcgtcactcaccaggcccgttgcagtcggcgcacacgtcgctgctccggagccgcttcgacatggtgcccgcttcacctgctgggaaccccgcgagcgacggcagaggcggcggcggctgcgcttccgctctaacgggtccccgggcggcgctggcggcgcctctcccccccgcccgccttccagcgcctctcagccccggcacactgcgcacgcgcgggggagacggcctgcggagccctgcaggtcatgtgaccggaaagggcacgcttccgtatcgccatcttgaatgagggcagaggtccgcccaaccctccagtgcctgtctctagatgctctcgcaattgtgtgtgtgtgtgtgtgtgtgtctcccttttgggaagtgattgcttgttccaggattgattagaaccagagaaagaagcaaaaccttgtgatagaaattttatacatataatctcccgggagacaacagttaagttcatttagtcatgtccataagaggccttagaagcacgggtcctgtttaatgtgattgatagttgccacgcagtcctccattagagcttttaggtactactttatgtattagcctcattcactctccaatgaccctgcacccgaggagaatgcactaggtcagtcaggattcgtggacaaccatcgttctcatctgaaaagctaaggttgtgtagctagagccaataaggaagagggggtgcttgcaggttgcactggacgacttcgtggcagttgtaaacatctgggcagacacagcacttgcttcgttcttccttgtgtcgagaagacagagcgcctgaagtcgtaacccaaagaatgaattttacttgtgcatattgtgagccaacctggattctccattagtcctttgggccacaatcctgaatctgaatggctagcttaaggagactgatgcggaataaaccttcacggcaaacgctttgaattatagccgagttgggaattcagacaaaacggtcattttcaactgggcggtttttctcctcctgggggaacaaccgctcccgtctggagacagttttggggatagtgaatactgatggcattaaagaggcgggcgtccaccctaacttacaaagcatcggatgacctccgcgcacagaaccacccagttcaaagattccaaagcttaaaagcccacagacacaactaccccgttatcaggagagtatctggtgccagctctccaggttccagctcgccggtgaaaacgagttcccgttgcccacttccaaaatggtttctgaccaatcgtggaaggcagcctggggaggctccagccggatggtttggtccggcctgcgcgctcaccccgggctgcagagccgatggaagaggcccgattgtggagcgcaccactggaagaggctgggcaggggacgagagtcgcggggcgcgcatcgtggactttgtgcgtggagatctcgggcttctcggaggccctgcggtcccacagatcgttgtttgttgtgtgtcccggggtgggggcgcggcggagcgacatggagcgcggcttgggccggtcgcgcggtcgcgtcccccggccgcggcgcgcgatggaattccccgtgcacttccctgttcggggcggttcggccggcagcagtcggttcgcgagctgtcagcgcgggcgcgagcgcgcggggcgcggggtgggcgcggccgagcgggtccccgagccggtccccagcccggcccgcgaccccaggcctgccgcgccgcccgctccggactcggaggcccttgtcgcccgctgcgccccgcactcgcccgctcgccttccttctcccctcgctctccggccggtcgggcgggcccccgagaccccgtcgggtccaggctggtggcaggcgggcggtcaggcccgggtggcggcctcctcgccatgtcctcggcccgcgacaccagcagccgcttcccgctgcacctcctggtctggaacaacgactacgagcagctggagaaggagctgcgggaccaggtgaggtgcgcggcgcggagtcgggatccgttctcctcctgagccccgggatccatagagcgcttaccgtagaccgggctcggtgccgggggcttttggtccattctcctctttctgatatcgttaggaatgagcgcttattgttccatttgacagagaaggaaactgagaccccagagcctacttgccttgcgcaaggcgcaaggccatcgggctaatgaaaaccacgtccagatcgtttatctcaggctcgctggccccagaattcacctttaagctttatggccttgaagacggaagaaacacaccttactccacccgccctggtgctggggaagagcttggttggcttcggtggcctggttctaactctcttgtgaccttgggcaaagcagttacgttggggggaccccacttttccttacccattggatgaggatggaggcagtgacgacggaaaacccagtacttgtctaaattgatggggctgcggctgggcctaggaatcggggttttaacgagctccccagggtggttggtttgagaatctctgctgctcagactccttaggaccttcctgttctgaagtgctttttttttttttttttttttttttttcttttcttcccacctctgtaaatcagtggttctcagatgaagatgatagtgaatatttgggaatgcaaggagacaagacgttttgggttgggttgactttagaggtgggtgctgttggcatggcattggggagaggccagcgacctcgctgtgccttacagtgttcaaggcagccactcacccaccactgagtgttatcagactccaatgttagttagagccgtggtgaagaatctttgcattaatatgaattcttatttcatttgtttgggtttcttggtttttgttctttttgcttgagacagggtctcactgtatagccctgcttagcctagaattcactgtgtagctcaggctggcttctaacttgggggaggggtagcctgctgaaaggcagagccgcccaccaggaatgagacacctgccattaatggcactgcagtcatttcattaggcacgggtgccctgagttgctctctagcctgtagcaaatgagataaggatttataattactcccgaaatccgccataattgttacggtttggcttcattcattcgtcttagccagtgtgtcagagccttgcttttgaatgacttaaccactgactcagtaattgttgcgaacccttggttcttttgattggtaaacattgggccagccccacatcgaagcgctgttggaacggttctaagtgttggtttgcagcttgccatatatatatatatatttagttgtatgggcagcatgggaagtcagaagtggcatttaaaaaaaggattccatggcgggtgtggcggtgtacacgggtaacccaagacactcaggaagttgaagcaggaagatttggaggctagcctgggcaacttggtgatgatctgtcagaaaataaataagaaaggatgagactgtgtgtatcgcagtggccccaacacttgtccattgtgtgagaggccctgggtttcatcctcaggtgtgtgtggggcaggggagggtagtccagacagaagacggttttgtaagagtcattgttcttaattagatggcacagtaacgacttaggatttaaagagatatgacacatgcccccagagaggatgattcaggcatcccagtatacctgctgatataactctttgcatcacacacacagctcagaggccttctctagaatctaagcgagaagctcttctgcctatcctcaaggcccactctggacatttcaaagaagcagtaaccagttttgactggacacggtggcccacagctgtcgtggaggctgaggcaggagaatgacaggttcaaggccagtctgggcaagtttgactctgtctcaaaatagaaatgaaaaaaaagggctggcgagatggctcagtgggtaagagcacccgactgctcttccgaaggtccagagttcaaatcccagcaaccacatggtggctcacaaccatccgtaacgagatctgactccctcttctggggtgtctaaagacagctacagtgtacttacatataatcaataaataaatcttttaaaaaaatgaaaaaaaaatgcagaaaaaggagttgaagcaggtgtatcgcccggggctaggacgtggaagggtcccggttccggttccatccagccttggcacgggttctgctgtacacagtggttcgaatcccgagcaccgagcaccgttgaaagtacagagtcacgaggttaaatcgcatttgataggaaggtttgttgtcatcacaccacgggcttcaggcctgagttctgtaagcagctttctcctcactgaggaggaagagctgtctgcagaagtaagaggcgcaccttggtcaagatctcagctgtgacccagtcaccatttcctgaaaatggcgataaaggtacccggggacattctcctgtctttgaccatgacaaatcttgaggacgtttggaattaaaatttgggaattaaaatcttctaattttgagacagggtgttactgtgtacatctaggtggcctgcaagtcatctgtgtggcccaggctggcctcaaacctcctcagtggcctcccttcttaacctccccagtcctggggtggcaaggcttggcagggcttgggaattaaagtcttgcagtagattctatgggagaaaacttaaggtcattgctgcccttgacttcaaggttgagcgaatgctcatacttgccgatcctctggtcctctggttttgacactgccctaatttaacacaatgggtcccttgacagtgtagcacttgtgtctagggagtagaccttgacatggacatcttgccggtcataaccgtacagttgaacttcagcagggacggagtagcagtggagggctgcctcctctctgttgtcacggttatgaaatttttcactattttgaataaggggcatcttggactttcattatattgtaacttatatgactggtttggggtcaagataatccatattgctagaatatccttaagccacacagcaggaagtgtgtgttcattcagattctccattggttaagaaatagccaccttcctcttcgaccgggaggcagttgagtttagtggtcagtaccagtgctgagttgtggggggggggggcgtgtggcttgcccttgttgaatgatcacctgtgaatttgggtggcctggaactttactatgtagtctaggctagccttgaactcatggctgtcctcccgcctcagtcaatcttctgagggctggaattaaaagacggtgtggccagcttctgctaaatatttttttcttataaaattgtggggttgttctttttttttttaggtctaaattgtgtgtgtgtgtgtgtaatgagagagagagagcgagagcgctcatgggtctcagatctttaatttagttctgcctactctctgaggtaggtcaggtcgctgtgcttcctgtcctagagacctgaggagcctctcacttgcatgctttgcctgtgcctgagccgtcatttgaaactggagaggggtgctgtgctctgtctgaatcctgtctctgtctctcctcccctcgctctggagagaaagacgaaaagaagagaaatgaaaagcaaaattttgtatttttatttattcttatttggtatgcatttgtgtttgtgtgcatatgtgtgggtgtggtgtggctgtgtggtttgtgtttgtatggtgtatgtatgtgtgtgtgtgtgtgttcctggttgtgcttgcctgtgagggagccgggaggccagaggttgatgttggggtgtcttcctcaatcatttctctaccttactttttgagacaagctttatcactgaacccgcagctcatgatttcccctagagcggctggccattggttccccgggatgctcctgattctgtgtccctagtgctggggtgacaggtgtgtgtcatgcctggcttttacatgggcactgggtggggggtctgacttcaggacctgatgcaagcactttctttacacactaaggcacctctccaggccctgctttgtgtgtgtgtgtgtgtgtgtgtgtgtgtgtgtgtgtgtgtgtgtatctgtgtgtgtttaagataaggttccaacatgtagtccctgctgccctctgcagaaggggtgtcccactaaacctggctaagaattaaagtcttaaaccaacgagcccaggctggcctcagacctgccttcttaacctctgctcatcatccagggagcttgcccctacttcaggggagccaaggactgcagtagattgagcttctggcctacagtaaatggacccaatgccactgagcagcgtcagcacccctgaacccagggatttagcttcacgtcccggtttttctacaggagttgggagttggctgtaaaattaaaaccgaagaatccgagtcccctcagctgtaaagccaccattggccttgctctgtcgctgccactgagtgtcggcagctggccccctcagccttcccatctcatgaatgggacctgaagctggcggcccactagcattctattttgttcccatacctatggtagcccgagaagagttgagtttatccagaccaggacactgaacccttgtcagctccaagtgtggctgggagccggtgggcggtggtgtgacttggccgactgggggagtgtttcagtcacttacaggagtgcctcctaacccgcggctcagatgttcagtggggctttgaagttgaaggtgtctgtgttctagttgtcatctggccaactccattggcctcacactgatgctgggaagtgaatgaactcttacagagatgaaggcaatggcagtggcaggtgtgtgcgactgagcatgaggagtgctgggaccagtggggggtggcaggcagggagcactggatcagtgagggggtggcaggcagggagcactggatcagtgtagggtggcaggcagggagcactggatcagtggggggcaggggtagcaggcagggagcactggatcagtgggggagcaggggtagcaggcagggagcactggatcagtgtagggtggcaggcagggagcactggatctgttgaggatgacagtccactctttcccgaagagccagcagtgcaagcacggtagcagggaaggggagagaatgttccacactgcaggagtccctggagcctggtggaagtctgtggcaggcaggcaggcaggcaggcgaggtctctgggcacacattctagtcagtgccccttgcctgaaggcccacactgagcattccgaggtgaagcccccggagactctctggtgcacctccttggtcatcaggacttcaagctcacaaagccacctaggggataccttttcctgtctgacctgaggtggaagccccagtctcagaggcccagggtggcctgagagaggtggagagaagacagtgggtgccttccacccttctgttgggagacctcagaggtagtgactgccatgtgccagggccttgagaactcatgggagctactgtggcagctggagtcagcgcccaggttgtccgcagcctgccctcaaagaccagccattcttggcctctggaagatggcagggtagtaaagaaggcctttgtgcaagagcagtggcattatccactgacttcattcgagactcaaaggggaagtggaacttttaatgtgatagagctcgtggctgaggaatcaagagtcaagctagcaaggacctggggtttgttgaattctgagagctcctgctttctaagctctggtagctcagtgctgagcccgtgtgcaactcacggagctgtgcaaacctctcaggaagggtgacagctctgaacctgcacagtgtgggtgaatgctcacgaaggaggcagcaagcaccaagccaggtgaggcctccccccaccccacccccgagaggtgactacagtgctcatttttatctgggagcaaacccaagctcaggagaaccaaagcaacatcccaagccataaagcagtttatcgatgctgtattaggtcctgtgtgctgtaataaacgcacataccgtaagtctccccgtggcgggttgaacgaatggattcagcacgtggttccaagctcgaggtgtgtttgtgggggggttaggtggtgcaggcttgctggaggaagtgcgtactgggggcgggctttgagatttttttgctcctgcctcttgtttggcactgggatgtgaacttacagcccccccccaccccccggccgccacgattgcccactgtactagacaacccagcggggactgtaagccaaatgaacacagtcattgcagtcgctgcggtcacggtactttgttacagcagcagaaagtaactaacaggctctccatgtaaagtggcctagcccgcagtgtcagtgtgtctgtcccctgtcagttccaggcatttccatcaccctaacaatagcctcagcccatacaccctcccccctcatcatctaaagactcccacttgccaaatgccacatgtcatctgtgccaccatctctgccatcaaacagtggcttggtctgttggcctcaacttaaccacttctggcaaaatccaaagcttggtttttgtttttaacctgttaacccttgaaattcttttttaaaaaaagtatttgaattatttttaaacataataaataagaaaggaaagcatatatatattcttagcatccgcttttcccttctcccaatccctttggtcccccacagctaatgtgtgttctgtctcggtagacctgtctgctctggaaaggccacagaaatagactcatgtagcctggccttttctgtctagcatcctgcttttgagattggtctattctgtggcatccatcaggtctccattgttatcactaaatggtatgcttctgcatagatagactatgtcttgttcgcttataatatggccactctgtttagctttttgaagaatttctaattttcagaacagttgcacttttttgtttcttttcgagacagggtttctctgtgcaccccaggactgtcctggaactcactgtgtagcccaggctggcctcgaactcagaggtctgcctgcctctgcctcccgagctctgggactaattagttttggagtggattctgtaggatgttctgtgtgtatgatcctgtaacatgtgagtagagatgcttttattcacgtgtcatcttgtgtttttctgtatgagcgtgcgccacgggcatgcaggtatgcagagagaccagacaccccgggactagagttagaggtggttatgagcttcctggtgtgtggtgggaaccaaacttgagccctctgcagcagcagcagcagcatgcatgcatgcatgttagcttgtctcagtgtacgtgggctgcagggatagcactcgggaggtcaggcttgcgtgggtagagcttccacccgccgacgtgcctcctctgcacccacgttcattcttgactctaacagctcttggttttaaaaacccaggtccctttttcttgccagtgtaccgaggcatctgtgggtacagtaaacgtgtccagagccctctgcttcgatggtttggaagttccttatctcctctctgacctttattcccccacggttttcagtcacactgtcaccagtaggagagaaggaggctctaaagagtcctcagcagctgtgcaagaaacgtggcactcatgtgtctttcttcagaacagaggaaagcaaacaacgtatgtagtgagctggggttctgtgttcgcatcagtctaagaattggttgcccgggaggcggagtgttggctgcagcctcagcgttagagaacaggatggcagaactaagaaatataatacttagaccctatttttctagtctctttggtgcaatgggcaagccatacccttgaagtctgggaaaccctgggaggtgacatggactgtatgtggagacacgattgtagagtggtcttccctattcaagactttcctttatgtcaacttgacccactatagaatcaactggattctagggattgtcagcattgggttggccagtggacatgtctgtgaggggttgtcttaattggtttcgttgatgtgggaagactcaacccactgtgagcagcggctccatcccctttgaagtgggttctgaaacagttgagagaggaaaaagcaagctgagagctggtaagcgagcatgcctgtatgtttttttctctctgctcttaactgtggatgtgatgtgagcagccatctcaaaactcccgccttttatgatttacccaaagcaatggctagtaccctggagttgtgagccagataaacccccaccaccgcctggcaccagactgctctttttcagggtattttatcacagcaacagaagcaaaactagaaggtcacccatgattggtcagccacagcctgcaactaccaagtgggaaattccagagagaacttgtctgtccccagttgtgtgttgctcagcgtagggtggtgacatccctactgactgctctgttctgtgggtgacatgagccatccttgtccagcaagcccacactgtgtactgctgtctgcgagtcactgaccagccgctgtgtgtatcagatctgcacatggcactcacaccacagtgtctgtgctcacgtgatcttgagtttacctcacgtcccctaggtacgagatgatattggcagctgggatgtgcctacagggaagctaacgttagtccttgcagtgcaaagatgaaaaggcttaattagttctttaaaaggagtctcactatatagccctggctgacccagaaattaccatgtagatcaggctggccttaaactcagggagattcatatggccctgccttcagggtgctgggattaaagatatgggctgtcctgctgggtgacaattcttgatcttattgtatgagtgtgtatgtaggaaaagcatggtaaatttatggggttcagaacttagttttagggctggtgagatggctcagcgggtaagagcactaactgttcttccaaaggtcctgagttcaaatctcagcaaccacataatggctcacaactatctatacagctacagtgtactcatacattaaataaataaataaataaataaataatcttaaaaaaaaaaaaaaaaaaaaagaacttagttccaggccttcccaaggactcctgggacctatcccctagaggaagagggtaccctattttagcagtggggagagtgctggggcctgggacgggctcagggactcatgcccagcaggcacgctgctgtctgcgtcttttcctcgataacagttcttatctgtgttgtgcaatagctgtgatataattgtagcagaatgggaggttgcataactgtcagatggtggccgttaacaccccccccccccccgtcccgctcaacttccttcctcaggcctgtgaggcgattgtttgaagactatggtttgtacctaaacaactggactgtcaaggcaaagcccctttctttcccaaggaccggctggcgctcagaaagactcctgttcaccgtgtccttggaagaacttgcagttgtgcagcacaggcagagccaggacactgatacaccatcagactgggccacttggctctggggagccaaggggaagagggaggaccgcagacccagtgtatgttgagaaacgatgtgtgtcctctccgattcctgtacacgcatgttcacgggcgtgtccgacaggtctcactcccgctcagtgaggcctgctgtgtcctctgctgctgctcctgggcatctggaattcagcatacacacacacacacacaccgcacacacacacacacacacacatgagagagagagagagagagagagagagagagagagagagagagcctttgtagtaagtccaatggggaatacaggcttgccctggcccaagttctcgtctgagctctcaaggttgcctaccaggccatctgtccttgaacatgagtgctgagctgacccagagaagtccccagcatctgtagctcagggcagtcgcaccaggaaagctcccagccttctcaagcttcatttgaattgggggggggggggggcgcctcaccggtttgcattggaggccatgaggctggcagtcttgtctgtctgttaggtgagtaactttatagaaaaaggaactcattattttaaaaattaaaacaaaaaaggaacttgggcacagttggtggtgtactcctggattcccagcacctggagggtggaggcaggaggagctcaaagccagtctgtgtgagaacccgcctgtctccgacaaacacaaaacccgaccaactccgtgtgtgtgtctcctttgtttccatcccgagttcgcgctcgccctgtgcgtctgttgctggagtgtagccataggatgttctgttttttctgcacctcctaggggttggcagtgccctttcatgctctttatatcatgtgtgtgacaccagtgtttgcttcacagaatgcagaggccttggacccccggggtcggacattactgcaccttgcagtttctctggggcatctggaatctgctcgagtcttgctgcgccataaagcagatgtgaccaaagagaacggccagggatggacaggcaagtatccttgtcacccacgcatccgtttcagtgtctctgaagacgatgagtcttcagtggtgctctcagggcaaggggcagggatgacaagatgaagccaggatactggtctcccccgtcccgaaccctcagtagagggtgactcctctcccagaagtgagtccaacatctaggagcaaagctggtttgaccctgggagtatggtgggaatgcaactgaggccaactgaaatcaaagatctgagtgccagaagtgccccttctggtgaaatcttggtttttgctgtttgcataccctcacgaaacagtagtttcatgtagaccaggcaaggactcttgtgtgtgtgagtcctgcctccagaactacctgaaggcaaggtggtgtgagtgcaggagggggcagtttcaggctagtaagtgggccgagttttcttcagaggagtgagagttagcagcagccgtccatagacccagcctcagcgctctgcctgtctgaggcgcgtcctggcctctgggcaaccccaagctacccctatggcttttcatgttgggatgtgtcagagcgcgtgaggatgctttgtgattctgtcccaccctttggttttctagtcttacacgaagctgtgagcacgggcgatcccgagatggtgtacaccgtcctgcagcaccgagactaccacaacacgtccatggccctggaaggtgtacccgagctgctacacaaaatcctcgaggtagctagccataagaccggccacgccgatctctgagccaaacactgccacgatctctggacacaggctccacggccttgggtgtcaaggttccttaagtcttcagaatagtgaatgtggcaccccgctgccaagtagtaccaatttcctcttgtctcgttgtcgtgcggggcctcctacaagttatgtctctggggctcggtgcttgcctttctcagtgccactttgaaattcaagcttgagggacagtgcatgtccaacacaatttgcctagggctctgtgtccttagcagagccctgtgctgaggtgatcacacaggagcagcgacgggcccagggctgtaccgcgtctcctcaccactctggccactcatagccattagtattctgcggcttctaatccatttccctttggcagttagtggctttagggacatcatctgtcttgtgaatctctgggcaagaggtctttctttaaaaacagtgactcctaggctcctgggttgtttgggatgatggctctctgccatttgaaaggaccgccccggagcacaggtggtgtgcccatggtgacagtggagggtccggtttatcactctgggattccagcttaagcacggaagtgactttcccagagcagctttctagcgattagctagttaggtcggtgtggagagagggaagaacttggctgtaaataaagcgacgggcggccgctgtccaagcactctgtgtgatgcttcagggaaatcccgtagagattctcagtttcccaggtaacctcagtgaactgtcccaacaagtgggagtggttacacaggttgtctttaagaacgtgcctgtttgcatgtttgtcacatgcagaggtcccgtggctctcctcctctcacctgtgtccccatcagcggagccagtcatttgagctttttcttctccctctgaggcagtgtcccctgtagcccagggtgctcagccatccgacgatgcccttgagcttccggtcctcccagttccaggtcccaaggccaggcaggtcaccagcgtgcgccatgcctgcttcaggcagtgctgcgatggcagtcagggcttctggcattgctgggcaggtagtgtgtgtgctgagtgacgtatgtcaccagccttcagctgtctacgttgacaaggaagaattaagatccagtgtaaaggatttttttttaaacctgtattgatcctcagaagtggattgcattgatttgtatctgatgcttcaagagttagacaatgtccagatcgttttattgtggcaccagaaactctgttgctgattgtatgttccaataatgtctccttagaacatatgttagcatttcttcctaaccagcttggcgggtgagtttgccaatagtaaaatcttgattggtttcactcagggtagatttccttgccttctgccccgtgcagagacaaaaatgaatgcaaagctttgggggtaatgggtgaaaaggaaagtaattctctatataatcccacctctctccctactgcctccccctcccctttctcagacagggtctcactatgtagccccggctgtcctggaacttactctgtagatctgtagatgaggctggcctcgaactctctcccaagtgctgggactaaaggcatgcaacactgcacatgcgcacacacacatacccatgtctctcttttttggacagttggttggctttcttaagtagctgttcaagagccttatgttagaaattaatgagacaagaaagaaaaaaaaaatcctaaacaaggatgttacggtggtgtgaaatttcagaaagccaaattctaaaagtttaagaggaagctgggccattggttaagcagagtgagaacccagttcgtgtggaagggacggctggcctcccgtttcatgttggtatgcttggccctttgttagcgggcagcacttcctagcacatccagccgcttacagtcatgttccccgaagaagacagggaactgccttccttctgttgaccttggacattacccacatcatatggcagctttaactcacttaatgcttgcagcccagagaccccagtaaggttccatttcctacccagtcacttttctgttaacttttttctctttaaagataacctatttatttggattgcagtgatggcatgtttaccacaccataaatgtaggcatcagaggacatcttgtgggagttggttctctccttccacagtgtgggtcctagggagcaaacttgggttgtcaggcctggctgctaacacctttgcccacggaaccatgtagctgcccgatagtattttcaccaggataaataactcatcaaatgtaaaatatctgttttagtgtattcctacattgtctctttgcatttctcatccctccaacaattgtttaagacacacattagccgtgtgatgcttgctgagttggtagtaccatgggtcgcccctcataaccttctctttgcccttcaggccccggatttctatgtgcagatgaagtgggagttcaccagctggggtgagtggccatgggcctgagatttatttgttctcaaattcacatagtctccataggtttatcttccgttgtaaaagcggtgtgtgtgtgtggtgcagtgtgtgtgtgtgtgtgtgtgcgcgtgcacgtgtgtgatgtgggtctgtgtgttttaatccacatctggttgatgccctgcattcccatttagtctctggtctttcttgctgaacgttgttggtttggccctgaacatgcagtgctagcatccagacaaccgtgtctccgcctcacatcgagtgtcccggacacccacattgttagtttgattgcctttcatgatttttcggggtgagtggggtcaggctggtatagacctgccaggctttctactctgggtagcccatcccggccacagccagtcctcccaccctccgtgctgggatgacaggtgcgtgcccacacttgcagcttccttgagaagcagggtctcattgtggcctctgggcgcctggactgaagggccttcctgcctcagctccccatgtagctgggaagctcggaccacctgtctgccaggtctgtttgaaatgacttaccacggtttgacttaagttgtttcgcttgattctttcaaacttgttattctggggaaaatgagatagagtggaattgttttctttctgatttttcttttcttaatttaattttctacaaaatgcatgtctttctctaaaatgttctgtagtacaatttttttaaaaacatgtattttttgtgatatattaatacactatagctgtcttcagacacaccaggagaaggcatcagatcccattacagatggttgtgagccaccatgtggttgcagggaattgaactcagggcctctggaagagcagtcagtgctcttaacccctgagccatctctccagcccctgtaaggcaattgatgatataaattttcatagatcaagctaacacttgatttttatagcttttcacctcactctgatttccagttttgataaagagcagattgtttttttaagatttacttatttatttacttattttaatgcgtacactgtagctgtcttcagacacaccagaagaaggcagatatcagttcccattacagatggttgtgagccaccatgtggttgcagggaattgaattcagaacctctggaagagcaggcagtgctcttacccgctgagccacctctccagccctgattaagagcagattttagatccttgatatatttttaatggcggctgtactatgggagatgtgaccacatagcaatagtagtagacgtgagatctgagaaggccagatggacacagccccagccctggagggtcagctcaggtcttgggaggctgatgggaaatctctgtactgttttctctgacatgctagaggaaaaggctgagttttctttgtttttaattatgtttttaatgttaggacttgagccccactgagctatagctctagccttcctattgcttgtctgcctgcctgcctgtctgtctgtggtaccaagatggaaccaagtacataggagtgatccaccactgggctatgactctcacctcttagaacattgtttagtttaaattggtcttactaggttgtctgaccagcctcaaacttgctactgtggcccatgctggcctcaaaatagaactccttccccagcctcggagtgttggggtgcaggcctgcaccaccgtgcccagctccctgttctgctgcaggatgaggtcctttaggagccggaagggatcggtccagttgtgtgcgccactgggattgtataccgactctttgcaaaagtcagagccctgagtccctggtcctccgagtcctgctgggcccttgtgttcttctctgtaatacacctacctctctcctccagtgcccttggtgtctagaatatgccccaacgatgtctgtcgcatatggaagagtggagccaagctgcgcgtggacatcaccttgctggggtttgaaaacatgagctggatcagagggaggcggagcttcatatttaagggaggaggtaagcaagcattgtaggaatcccttcttgttgttactgagataggtctcactaggttgcccaggttggccctcgcctctccttgtagaccaggctgacctctgcctctcgacactgaagttaaaggtgtgcgctcccatatctagctgcatgctacatttgaaccagtaaaatatatttgtattttattcttcgtctgtttgatatttggtctgggcggttactgtaagtattcagttcttcatccctcttattttgaagattggctagttccctgctcactcattactgaacaccagttgtctgtcacacgtgaaatgccaccttctgtcccatatagcttggcattccctttgtgattgggcatggttctatagtgaagggagatgccacagtgctcacccgtgtgcctagtagatcatttacattaacgccatagcagtgctctgtaaaggtcacaggtgaaatgcattgctaataaagaagaagtattgggtttaaaatctccattttggggaagatgctccagggtctctggtgagtcgaagagtgctgaccagaggagctctgtgcaagcagagtcagtcagtaattggtaacctcagaggtgaggctcagtgggggtggaggaggggaggggaggggaggcctccatgtagccagctgcctcacactggtcctctccctaacagacaactgggcggagctgatggaggtcaaccacgatgaccgcgtggtcaccaccgaacacttcgatctttcccaagaaatggagcgcctcaccctggacctgatgaagccaaaaagcagggaggtggagaggcggctgacaagcccagtcatcaacaccagcctggatactaagaacgttgcctttgagaggtacggactggattccgggccaccatctcgtctggggactgctttcataaacgacagggttgcagtgatcggaagttatagctgggttgggacttctctaatacggcgtaatgctagtcggttttaagagtgatctccagggctaatcaaataggcatcataattgatgtgctgtgcacggcatctctgtggcacggtgtcttaagtctcatccctgcgtgcttctgtgggccccttcttctgggctccctgggtctttttatgttttgatagttttggatgcacaacattccttcatcccaaaatgtggaacgttgagtttcctgatgctagagttgactggaattgtgctgatgctaggcagtcagatttatacttaacgtaacgtattgtcgccccaaccccgcctgtgaggcaacagtggggaagaagcacctgaaggctgcttagttctttccaggtcctaggaggcgctgggagctctccggagagctctctatcccaatgagatgccatccgtaggcgtccactgacacagccatcctgtgcgatgtgctgggcagggcagggcaggggcaccctgagcaggaaggaagtagaacctgctatctctctctctctctaccatggagctcagtgaaccgagggtatctgcagcatctctagagttggcctaggatgtcacgtctgctgcctgtgagtcagtgtagcctgagctcatctggtccttgttcctggatccaggccttcttctctccacgagtgtgctagctgattgatctctttaaccttgttttcaccaataaaattggtgaagaaaactcagagacagctctgtagtcaattctaaaacataatggcccttttctttttggtcaggaaagccacaaaggcaggtgtctgacagggactgggacatgcagcccctgtcacatcttggggctgtttctgcttcagaagtaggaataggaactggattctgaaggaagtcctctttccagcctactggctagggacactgaggcttaggggccagtcatggggtcctctggaggctcttggcctgatggccttaggtttcagcatgagcctcacaggcagggcgggccctcagaggctctagactagaggaggtgctgggtcactcctcgggcattgttagagccattgtttgctgtgaagtggagcctatccagggtgtgtggcaactcctggccttagtccaccaagtgcagatgggaaacaagagtgtggccctgtgtaccgaggacggaggtacattgtgtattctcggggtcacagggttttcagacagccagctccagctggttttcctgaagctgacagtaggccgaggcgagggtgctgaaagacagctggtttttttttttggtttttttgtttttttttttgttttttttttgctttgttttaatgatgttcatatgtgatcagtgaacgttggaataagtagagattggagccgctcctgagtgcgaggtttgcagattcaaagacacatgaatgatcagttccagcggaggctctctccgaggttctttgccacattgcaatggttactgtcatccttttcccatgcctatacgaggaattcaatgcttataaagcactaccctccctggtgagtttcaggggacggtatgtaactggccgtccttttcctgaatgatatgcagcaagaacaacatccctgccacttcagagccgcctttaaacttcataatattgagtcacagcccctgctacgtggcctttggtgtgctggtctcaggtgggacaggcagaaggaagctgggtgtcctgtggtcttcagatgccttgtggtgcacacagacctgacagaggctcagggagtcacagctgggtttaacatagtgaagtctgagcttcccagctcagatgctgtcagagcggggcagccaagaacagcaggagcagcgatggcgatgtgtgagagcaagtaacgacagccgaggagcgggtatgtctgcctagcactagtgcagcatggaacggagttaaccccgggcgcatctggggttttagtcactggtggcagcaagggctgtgacctgctagtcaggagtgtagtcccggtgccctgttcttgtttgaacagtgtaagctagagtagccagcctttaccagagtccttttaggactctatctcttgctgtgtggggtcatcttcacccaagaggaaaattaacacccatgggtcttccttttatgatgggttcaaaccaatctataaaactcagtgtgtcgcctgatttgatttactagaatcccactagaaattcctttctatggaatttatgttatggaaatataaattttacaaactgcattctgctcttgtgagctggctagcctgcgaccatcctctgagcttcctctgtgacaagacagagcaaagggcagacggatggcagctctccacagtgccaggaaaagctagggtgatgtcctagacaaaggccgggcagatgggctcctcccagggcaagctgctctgaaaagcagtcacacccaggagtggcaggaagctcttgcctgtaactccagcacttggaggcaagaggcttacaggttagaggcagtctggcccatatagcaagatcccgtctttaaacaaaaacataaaagaaaactaatcagaacttagaggctgtcctctgatcctgaatacactttcccctagaagtgtgtagccctgatgaaatgggtttctaagcacatagcccatgctacaggtgtagctgcaacccgggctgcctcaaaagtcacccatcagtgactgagttgaaaagccactcttcatgtccttcctccttgctatgcctgacaatgaacatgtggttctccggccattttgaaagctttaatgaccttccctagcctctcaacattgttatgggttctgactccacctgcctttctgccagaggcgggcaggaagctgtgtgttcacagttctgagaattcctggatggaggagaggctcttgtgcccttgcctgcagtagatgacccagatacatgcaagcaagaccttggacaagggccatcttcactcatttatttaggacagccgtccaacagatgtcatgaccttttgccccctgtgctggcaggtccgaaacagaagccaagagtggatgctctctttgcctggagtgcagcacactgataactgtgggagggggaggggatgtctaagccatctgtcactggtcgcatcgttttgtggacagtgggacgacgatttccaagtgtccttcactaatgtcgggggcgggggtggcctgtaagggctgcaggggtaacctctgtacatgtggaaatttttgtggtgttcacttttgtcagaactaaatccggattctggggctggaggacagataaagctgaagttgtcaatggttacgaagccaaggtaaaagcaagctcttcaactaagattccctttagcttttcagcggctatgcaaatgaggggtctgttctgattgcttccctggtctgccggacggacggacagtccctggggaggaagttctaaggcatctcctaccccctctttcatcttactgatttttttcagaaaatgggacagcatgctctgagcaggtccgtagctttatggctgttcagaaatgagatgagagacgttcttttggttctttaaaaaaaacttattattattatatttagtcggtttttctcttttaaagaagatatatagtagatagcttctgtgatcctttgttatttaagctttaggtaatttctttagctgactctaagccttggctccaaaacaaaacaaaacaaaaaaaaaaaaaaacaaaaaaaaacaaaataaccaaacccaatcgctgcagctgcttcaatgcctggaaaccttgcagtagcaatggcagtgtctgtggtatcatttggtattttgccaggggacaggccgtttgctagcctttccttagtgtacagcagggacggagggagtgtcttctgctggcctccatcacactcagcgagacgcacttagaaacagctgctgtggtgcagagtgcggtttctgcagctgtcagcacacagccgactgagacccctcacacagccctgatggacagcacagtgctccctctggcaaccagaatctcttgttgttagtagaaagccagccggttttctctgatctcccaggcggtctagagagccgaggtctggcttagtcagtactgtcaggagagcaccgcagatcacaggagacagacaggagcaggaggagcccggtggacaccctcctatctgcaagacacctgccgagcgagtccctttagctggcgggtgcagagtaactgctgagcgcatccctgggcgggcgggagctgtctgaggggctgaggctggctgtcggccagttctcgctttgattttgcttcagcattcttggtcttgcggtgcgtgtgttggctttcggtcccccatgtcacaactgtcttttgcacacaaccctcaaggtttactcggtaaacaacgtgagcgtgataaccaggatccgcaccgagcacctaacggaggaggagaagaagcgatacaaaggtaagtcccgccccgccgccacgcctcctcgccgccccgccccgccccgccccgccccgcactgatggattgatcctgtgcaccagcggtgttgatagtgctgtagtttctttagggtaaatgtgttgggtttggacatgcgaatcctaactttcctttgtaaaaatttccttagtttgactcgtttgtgggcttttccatggttggtttcaattgtaattaaagccactcgtgagggcttacttaggtgctgtggcggtagctgttggtagcagaggacagtgagaagaactgggactcttgtccttaggatgggtgactttgcggccattatagtgacaagatttctgtggaactcaggctttgggcagaatctccttggatctgtgattgctataccggctctgccagctctgtgcacagccttgggacgctgtctctgcagtaaggctctttcctgtgtagtaaaatggagttggtgctgagccattcttctggccactgagaggagtatgagtcgtcgccacgtgcaaacatttaaacagtgcagacagttacagttggccagcggctgcctctgctttgggtgggcaggtggctggcagaatacggcagtgggaaccaaggagggaagggacccagacccagctcctcacttcaaagcttgccaggtattacagttgctttgcctgaaatcttggttctttttttttttccattttcctgattgatcgctccatggtgagcgcttagattattaggacagtccctccaggttaaagctcctaatgagaaatgctaaagagaacctcaccttggtgggtggtttttatctccccacctacaaatggaatccctactgtcagtggcttggatcaggacccgggaatcgcagtgaggagcctgattccattgctcttccccccctcccccccagaggaccggaatccactggagtctctgctcggaaccgtggaacatcagtttggtgctcaaggggtgagttgatgacagggtatttgggggagcttaatgattaagattgcccctctcctgtttgcgatggtggctgtgggtcctgagcagggtcacttgacttgggaaggttctcaggtggctcctgggagagaactggatgaacgaaactttgaaaattcaagattttggaggaagggtagatcctacaaacgggctctctctctgataaacaagggcgtctctgagtgtggctcttaggtcaggctggctttattctgcagcctggctccttacacacacacacacacctcgccccaactaaccacgcatcaggagcaatgatgtcactgagggtcaggagatgcagcttcctttacagctttgaagctggagacaggaattccagaccctctatatcccccgcttatgcaagtggatgtcttgtttagcaggacagagatggggagagggcatggacttaatcgggtagacctgtttcggccagctccatgtcatgctggtccggttgggccctccccacagagtaacttctctcttcgtgaagctgtagtagatctgcactttcaggtcaggccgtcctgactctccctagttctggctcagcaggacctcgctacggagtgtgccactgtgaacaaccccacggccatcactcccgacgagtactttgacgaagactttgacctgaaagacagggacattggaagaccaaaagagctgacaattagaacgcagaagtaagtgtaagacctggatgtgcgcttccgtcttctgtggtttgctggttccttgtccctttcctttaaaagtaatgttgaagtcctcttctttctctctctctctcttaaaagatttatttattttatgtatatgagtatactgttgcttgctgtcttcagacacaccagaagagagcatcagatcccattacagatggttgtgagccaccatgtggttgctgggatttgaactcaggacctctggaagagcagtcagcactcttaactgctgagccctctctccagccctatgttgaggttcttaacctggcaaaacccaacagtcagtggctccttgccttagtcatagagggcaaagagagaggagcacgtgtgcgcgggtgagcacgcatgtgagtgtcagtgtgtgcgcgtgtgtgtgtgtgtgtgttttactgccagtaaaatctagctgatgagttgaaatgcagtcatgcagcctgctgcacaggtaggcagcaatgcaggcctttctcctcctgaggtcctcggggttccagtccctcaagagtcctgagctcagggctagtgtagaggtggggtttggaggacggtgtgtgtgtgtgtgtctagccttctgagcagcagtgacctgcctctctctctccctctctctctctctctctctctctctctctctctaccctgcaggtttaaggctacgctgtggatgtgcgaggagttcccactctccctcgtggagcaggtcatccccatcattgacctcatggctcgcaccagcgctcactttgccagattgagagatttcatcaaattggacttccctcctggattccctgtcaaaataggtatggctaaatgcgatcgagatggaggggcgggcgtttgcaggttctgcctgtttgtgaatcagactgaacctgcttcaggggaccggagcagattaaggacaaattagcagcgaggtgtggtggcgcacactttttaatcccagagtttaagagatagggttggggggatttctgtgagattgaagccaacttgttttacccaggaagtttccagagctgtagagagaccttgtcttaaaaaagagaaaaagcagcagtaacatttaaaaagaaaaatcagcagagctgggcaggtgtagcacacaccatcaatctcaacactcagagacagccagggttatatagagaaaccttgtctcaaacaaacaaacaagttagcacacgataaacagaccagagaaggccagcactatcctctgactgggcaacaacgggaggctccacgtgatgtgatgtgtgattgctttcgttaccagccagtacgtagctctgtgtacagatgatgctatcaggcacgggctggccaggagggctggcgcaccttagtcccagcacccagcagacagaggcaggcagagcaggatgccgccgaggtcagccttgtctacattagaagttccagacagctcggagctacattatgaggccctttctccggaaacaaaacaaccctccttcccttccctccccccaaaacaaacatggattctagtgttagtgtcctacctttaatgtaagcaaaacttcaaattgggtaattttattttgaactttttggattattctttgatattttgttaatacttggataattccgtgtgtgtctgtgtgtgtgtgttcgcgcacacttttgatcatccacatgccctacctaactgctctccaccactcctagataacggttgaatggaggcgtttggcaggaagatcttttgatgcatggagtagtgtagacaatgctgtctgggttttgggtggttgactattcatgacacctgactcagtttctcatctgtgcactcggggtagggggtagctggccactgtggggactgaaggaagccgtgctgataaagcacgctctgcgcatgctcagcgtagtgctagcatctgaccactgttctcagtgaaacctactaacaaaagcttctgttgggcagaaatccccttattccacgtcttaaacgcacggatcacattcggaaatgtcaatggctgtagcactgctgatgagagccagggtgtggaggggaccccggccgaggcaggtaagacgaaccggaagccggtcggtaaaacacggaagctgggactttaaaagcaagttttggatactaaacattcggaaatgaggcaaatctgtgtttcagaagaggagagtttggattaagtgggaaacaacttggaacggtggaggagggaggatatgcttcagccgtggtctcaggaggccggttggctccattgtagagaagaatctttctcctttgcagtccactcttgtttccttcctgaagatcatcatgttagaacagaagctgtgttgtgaagtttactgtcacgattattatccctttagagtctccagagcaaactgatgaggactttcatcatggcctcttgtcttaccttttattgtctgatctcacttagttgtcgccctgtgggcggggtcatgtgcgccgggggtggggccaggagcctccctgctggcaagctctgctctgttctgccgggccacaccctcagccccgccccaccccgccccaaccctccctgccccaccacaccctcagcccttgggttcttttgttactggtttcattctttttaatttgaaatgttttcaggctgaggcaggggcaggaggggctttgcataagtaatactgtaagacactgtaattagaggcaggggaattatgagtttgagccagcctgagctatattttgaatattaggccagcctgggctgtgttttgaattttaggccagcctgagttacacagacactgtctccaaaaacaaaaaaataaaatcagaacaacaaaaaacaaccctctaagaaacagtttgtctgaatggatagagacctggacttttgtatttcagtttccgaggccacaaacttcgaggttgatcagtctgtctttgaaatccctgaatcctaccacattcaagacaatggcagaaacgtgcacctgcaagacgaagactatgagatcatgcagtttgccatccagcagagcctgctggagtccagtaggagccaggtagggtgtcagcctgggcccttggggctgatccaccccgccctgccccctccccattccacctcctggggaaatgttctgtgttggtcatttcacaaagcttgctatgtaagagacccagcctctgtaggttggcatcatgtcttcagacagactttctgtcaagtttaccagtgtagctgttgtgtcattgccccccccccaggggtgctttatagtcttgtacctctgacatttacatctgtaaagcagtctttacagggagtgctgtggattctgatctcagatgcagccatcgtgtgcctctcaggcttagtcagtggggtgagagaatggaagcccaggcttgaggttttcccattttaagaactaggtagccgggcgtggtggcgcatgcctttaatcccagcacttgggaggccgaggcaggcggatttctgagttcgaggctagcctggtctacaaagtgagttccaggatagccaagactacacagagaaaccctgtcttgaaaaaccaaaaaaaaaaaaagagctaggtaaagagtgttagggggcctatgcctcattcctccagaccccgactgcttgaaacagtctgggcattaaagacacccttctggtgctgatgtgtggtctctgctgtctgctgttactagcttgggcagaaggcagcatcaacctggggacagagaagaaggaaacccggagtgtaaatagtcttttcctccaaggcagggtcatgtggtctggaatggctgtgtgtcctgggtttttgttgtccatttgttggtcattggtttcttctttcttcccacggactgtccagcaggaatcacagagcatgctggggattcatgggtgaaatcgcttccgctctgctggaagctctgagctgtgagcacggtgtcctgccatggctttccggggcttgagtaattggagccccgctgtctttcttacttgcccactgccatcacagacccgttccacacatcccatcctttttctttctttttttttttttctttccttcattaattaaaacaaaccatgtatcgttgttttcccctgcatgtctgcctgcacctggagcctgagcaggccagaataatgttggctcctctgagccagagtcagagatgggtgtgagccgccatgtgggtgctgggaaccaaacctgggttctggaagagcagccagtgctcttaaccactgagccatctttccagccctcactggggggtgggggaaggtggtgtttattttgggggagctccttggagaggatccagcccctcacaaagccctccgtgcttcctctcagcacaaaccagcttctccttgttctctggatagctataagaccttggcaacccttttgagggcaatagccagagtctagggcaacagatagcaactctatcttcttagtttgtcttaaaagcatgtcctgtcttggttgtctgaatgttgcgccaggctaatggttcttactagagtggaagtaggtaaagcatgaggaggtgatggccttgaatccagggtacacgctgatgatgccctgtgccacgttagaaaagcgtgtagcctgtcagtcactgttggcggcatgctgtctgcggcaagctgtgaacgccctgagtcttgttctcactccgttcacttcctggtcgctttggcgactcttcctttgacggcgagatgagttgatacctacactttgtttttgtatttgccaggacctttcaggaccagcttccaacggaggggtcagccacacacacagctatgaagcccagtatgagaggtaacagatggggcttctcacgatgcggttctcgtcacactgaggttgtcacaggcacttgatacaggggcatttgcccggcttgtgctcagcaggaggttttaagagtcagctctcctggcatctatcgttactgtccctacttaaaccagctctgaactgagcgaggggcacagagtgctagctggggtgcaggttaggggtgcttagagcgaagcattgggtaaatgttttctgattggcgtggtctcctgtgaccgtgtgactgcgggtctgtctgggaggacattcagggttagagagagagatggaaatggctagaaatcccaaacaacggccattcctcccttttcctatatggtaggcatctgagcattgcaacctcagctttgctttcaaacagaccaagttccttctactcatagccttgtactgggtgatgctgggtcacagaggcccatcagctccacctcaggaggcaagatgaccccatgcagctggagtgcttggcacggtgcacccttagtaaccagtaagagagagatggagctgctgcccctgcacccccaggacaggaatgacgctctcccactctctaccctagggccatccaggagagtctcctaaccaacatggagggcaggtgcccaggtggcctcagcgagtcgagccgattcgatagcgacctgcagctggccatggagctgtctgccaaagagctggcggagcgggagctcaggctccaggaggaagaagcggagctccagcaagtcttacagctgtctctcactgagaaatagacattgccgtccagggctgcagagcagaggctctgggctgcacgtgccatgccagtgaggcagacccggggggccgagggcctgcacttacacagcagcccccctttccttatgtagaggtgcaggaccagggactccccagagcggagatccgggcgtcggcagagccccatctccacaccgaggggaggagagcatctttaccttccattcgctgtcctgcctggcaggtcacattttttttttaccagctttagacagaaatgctgagcctgcaggctagtagatgcatcttagtcagaagtgacaagctactgcggagtcacggtgcttttccacaggagaacagcagcctttgtagagtgggtacgagctggagacgttccttcctgttcaccaaagaaacgggttatgctgacctctttatttcccttcccgtagggctcttgcagcattgccattgtgccagtcccatttccacctcgttccatgccttttacccccagccaagaggatatgtacaggagctattttagattatggctatttgcatcaaattcagatatacaaatgaccacggatgttgccttagccttaaaaaattactaacagttttaagccacctcactccacacactgaggacctgatttgaatctgtaaaggcagtccctttgggagcagcatcctctgggctacaccaaaggcagctaatcctgtccttggaagagcagctagggggcccccctgtggctgggttctcagagcaggcaagctggccacatcactggaagagcccagccagtgtgttctccgcctgctcccacttaggatttccagcctggggagacccagctgcacagcctggcttcatagagaggacaggacgaacttgaaacaagaaagggagctaacttagagcagaggctcttcatccaaaagggaaaaatgatgactccacactgctttttagagttcaaatcaacatctttctggaaaaatatattttttaacagaatctttttattatttttaaaagatataaaactgactcctcccatcagtagcaatacaaggttatgcattttaaccagactttctcaggcctcttttggatacctttagtagttaactatttttgtctaaccctcctgtaaatacctactgcataacagcccaacccctggggaacacagccgagggcaccttgcccctctcacctggcgcaggcatccacccccacaaggctgtgctgatcacacggcaaaacagtaccttttcctctgttctctgtctgtttcctgttatgcttctttggggataggaagagaagccaccattcccaggaatgtctgtttgatacagtcagcgttgccagtaaaatgttctgagacacaaaggattgtgagtttcatttctcatagccatttgccttttttttttttttttttttttttttttgtcacggtccgatccaaatcccttccctgcacacaaggccagcatgggcacattggttccgtacccaggctggtggtctgttcacttgacatatgccaggggcacaggcacttctgggaggggctgcagctgtgccatgcgtgatcacagagggggaccctagggaacaccctcgtctgcatcccgtggctctgtttccctgaagtctgtgactgtgtccccggaagccacataaagcgggactcagcattgcagcagcttcttgcagcctttcccacgttctctctaaaaacacaaataaatccacttccgtaaatggtgcttagtgttgacaggcctgagcaagtcctccagtcattgtgttgccggaacacaggcttcctgttcacacttaacttcctgtccacagagcagcacacccctccttgccttcactggatggaattaaaaagtgttgggctacctggatcctctttgtgggcctcctgaagtatggtgcctttgaaaagagaaacagactcgcttcttgaaactcgagtgctgggggctgcttttaacacattcaggtgaaaatcgggactttaaaaagaaacaggtagtagctgagtaacaaatgatgtcagggttccagaggtgggcgttggtgttctaggagacagaaagagcaagaggctcctgaaggcataggggtacaaaatggggcaccaaggctccggtgcccccagcaagctgaaactgagaagttctacccggacatactgctggccctgagtccaggctcccgagtgtcccagccttggcatgaaatgcagcaggaaggaaaagctggctttaaacggtgaccggaccgtacaggcagcagcatgggctcaggcgcctcacctcctgactgtgatgacatggagagatggaccggactatagaaactaggtgactgtgggacagtcctggagaccaaggtgtgctacccagacctcagtctagaaataggtgtgggtttgggctttcagtgcagctgggaaatgactggggctcccagtccccagacctcaaacagtgccctatgtgtggtgtaggctggtcacgtattccactggctacacaggtaatgtggtcacgtattccactggctacacaggtaatgtgtgggggatggtttgactaaggggccttgccttgcacccctgagttccctttagtaaagctgtatgtagccttggttggccaggaactcttcagagactcaccgacttctgccttaggagccctaggattaacggtgtgcaccaccaggcctggcaacttatttttaaatacttttaatcgtatgtgtctgaggagggagggtgtacacttgagcgctggtgccctcaagccagggcctcctggagctgtattcataggtgatcaggcgctgcctgctgtaggcgctgggaagataagcccaggtcctctggaagagcaatatgtgctctgaattcccgagccatctctccagccccacgatttctatttgtaaccatgcatttctggtctaattctttgccccgggaaagagtctggagaacttcagcccagtacccctggcgctcacatccatgtctacgccaagcaacgaacgagtaatgagggttataggcttggcaaagctctggtgtttccttttaaaaccttaaaaaaaaaaaacaaaaaaacaacaaaccggcaacaaggactagagtagcatagcaaagcaggctggccatgtcctgctggggagaccagcccgtggtcactcctacacctcagtgttttacaccattgactgcagagcaccagtgttccctctgataaggaggtgggcactggagagggagaggtttaagttcttacagtcggccctggggccaaaaccacaggcctgttctgtcccagccgactccagctcagctctactatttaatgtactcttttaaactccactactcagggcttccttaaacaaataaggccagatattcattcattcattcattcattcactcactcacccacacccacatacgcacacctgcattaaagattttttaaaaaggattttatgtatatgagtgtttgcctttgtggaatgcgtggtgcccgccagatatcagaagcaggtaacagatcctctggaactggagccactggtagttgtgggccaccacgtgagtgctgggaaccaaacctgggttctctacaaaagcaacaagtgttctaaggactgagacatctccagcccgaccctgcacttcaaacacttgggaacgtaatgaggcacagaacagcagacaggatctctcttccatttaactgacatttaatggctcagggttacaaggttccagatgtgacccccacagttgggtggtattcacattagtgcaggctgttaagttaaaacacaaaaagaatacacagtaaagcataacaacattatagcaaaattaaaataaatactaataacctctgtaacaacagggaaatctagttcagtagcagcacctgaaaggcagacaggcagtctcgtcaacacagcagcttggaagggggggggggaggtgcacacggctgaaccctctacacctagggagaaagggagactaagtcctaagtctcaggttgccacccgtcaccatgaggatatctatatgtctgagccacccagaaccttccaggccgaggtgggaggtgcagggtgagggtgggggcgtgtgacactatctcacagacctaggatgcgacactgattggctcagtaccaacgcagcaaggaatgatggctaagttccccagctttgcagccagggtattcgagggcaactcagtggagtgagatgtggtgtgtatttttatagttacttattcctgtgcagaggtcaaggaacaacccatgggggtgggaggggggtttctctccctccaggttccacccaggaatcaaaattggcctcagtagtaagtgcctgtacccgctggatcatcttgctggcccttgagtatgatgaacacactgtgacagaaaggcagaaagcaggggaggtctgcatgcttaggtcttcctcttctatcccaagcattagcgattagtcctcggggtagctcttctggtcacttcgcaatggacatgtctttacaagggcccttggagcctccaacttttaaccagcacagccaagcaaaaagagacaccgaatcagtagccaataactgaaaacaatccccactgggcactttcctaaccctgtagcatttactgcctgcccagttctgattccaccatcttcagtagcctgcgtgcaacacgacttctgtcccggagacttggagcagcgcttccccgtgtggccatcaccgccgacggatgggcttgtagacacagaatgccataaggaggacagtcaccagcaggatgctaaagatggttcccatcagcactgcaaagggagaacagattatctatccatgaagagacagcactcttccaactgctactcacaccaaggggacttactacacggggggcctggaaatagccatgaacaggggctcactcaagacaccccacagatactggaaagtaaatgtgagcctccttcagacagcccctgctctgctcgaggaagaaccacaatgtgccaggaggggggaggggaggaggctcctgagagacaactcaggaggccagggcagtcccagggctcagcaaagggccttgaggccagaacaaggccagcaagtgaagcaagcagggagtatcatggaaatccaaggtatgcagggcctttcagacaacaaggaacagggactggctgctcactgggtttttgaaggttgtatatgtgcatggtaaggtgtgtgtgtgtgcacgtacacacgtgtgcacaaggccaacacaagatgtcatatctcttcctgcaactgctccatgacttgatgccttcagagaggaggcccgccgcccccccatgggacctgaagcttgctgttgtcatctgggctggctgaacagccagcaaggtttctgtcatgtgcagctttgtatgtgggtgtcagggactcgaacctgggtcctcgggcttgcaggctgagcagtccctcttactgaggcatcttctaggcccaatcctcactaagtatcaagaaaggctggaaggcctcaggccaaggccacctgatctgatgagttgggacaaaaaggtcctctagcttctgttctgagaacatcttgtggcagatggcagaccagggagcctgggtaaataaccccagtcagtaacccaggtcaggcgttgggtggatcctgagaagatcctcctcaccaaaacagcaacaactttacaaacctgctttaaaaagagagtcttgggctggagagatggctcagcgattaagagcactgactgcccttccagaggtcctgagttcaaatcccagcaactacatggtggctcacaaccatctgtaatgggatctgatgccctcttctggtgtgtctgaggacagtgactgtgtactcgcattcaatcaatcaatcaatcaatcaaataaataaatcttaaaaaaaaaagtcttttaagaacttatttttgtgtatgtctgtgcatgcacaggggtcaaactgattaactcaggtcactggtgtgtgtgtgtgtgttaaaacatttaggtgtcctgtaagtgtgtgtaaatgccatgtttataaatgtaagtgtgtgtatatgccatgcatgtacaggtacttcctgcagagaccagaagaagacactgggcccctggaactagaattacaggaggctgtgagccaccagagtaggtgctgggaaccaaactctaatcctctggaagagtaggaaatgcttataactgtggagccgtctctccagcccctaatgtctttctgtgggtgggttcccatctaaaatattcaaggtattaacaggaggagtggggcctacaggtgactactgagcctggtgtgccaggccttgaggacctgatgacataaataaccagccacccaccttactcagcaatagctgtcttcctccgggacactcaaaacactatgaccaaatttacaaacccttagttccaactacgtggccccatgtcaagttccaactgggtctgaccatgattgttgtgaccgagttcctgttcctctgaaaagccaagacccaaccactttccaggcaataatttcagagcctctgtgcccaccccacctcctacaccatcacatcctcttagcctggtcattcaacacaaaggttcgtcttttcttggtgaggaaggacagaaaaacatgacagagcatgccacaactccaaaaggccagatgtcactttaagacctttatggatgctaggaaccaggctctcttagagtgcagcctgcttccgggtttgtttgttttccaagacaggggtttctctgtgcagccctggctgtcctggaccgggctggcctcaaactcaaagaggtctacctgcctctgcctcctgaatgctgggattgaaggtgtgcaccactacgccccccccccatcccccactcctgcttctgcttgttttagaaagcagagttcccttccagtctcagaatctgtcttgaaagttttgactctttaaagcctcttcctaaacataaggaaatggtttaaatggagcaagaggatttaagtccagctgtagtcataactttaggaaactgggaattcgaggcttttgtcaacttgaccaggcacttagtagttggcctgggctatttggcgcaggtaagaccaagaagaccaggatccatactggagttaacacaagctccaggaaacctgatacccattaccagcctctctggacaaacacacacaaggacgcacatcctaaaaatctaaaaaataaaggaagagaaaagcttaagaccaagtgttaggtccataatatcatttggattaatatctgcccggagcccaataagtccctctattcttcatccttatatcaccctctcctgcatggcatatccagtaactgactggactggtggttccaaagagaaacttaaaagacaattttagcccaccctatggtcactgagccccattctgcaccgataagctggggcaagcagaaacccccttaaaaggattcctttaagcttaactatagattaccttcaaaacttcacttctgatcaaaagaggcagcactcagggtggcaggcaagtctgcatctagagggtaaaagagactgtggcccctgccttccctcccaagaaagaatcacttgatcaaagatgtggggagtgtcaagggtgataagcccagctccaaagggaaatccgtgagaaccaccgccctgcactcgcttgtgtgtgtgtgcgtgtgtgtaatagacaccgccctgaagttccttcaagcccccacaaaccccggattcaagtactgacatccaccacttcctaccggagtacccctgagtaacacaactctacctctgggcttcattttccttttctccagaacagggttgaaaggcctacttttctcattagccctctgcgaggcccaaaagaattcccataaacagcgatgctatctaggaacccttgctgtgtaagaaatgctaaaacttgtcaattatgaatggccatcgctgagaacggatgagggatgcaggatgagcccggttgcctaggctgaagccacagagcgagcaacagaggagctcacacacccccaggactccaggttctcgcttcagcaggtgcgccagacagcacacaggggtgcaagcgctggctcccaagcctagaactgaccccaggaaaagcagcttcctgaggaccagatgtagacactcgactcgccagcaagaaggacgccaaaacaggattcttctgcatacatttattgggagagcttgatagtgaaagcgaaagaccccgaggccaaaaaccagtgctgcttatataggcctaggataggcatgtctacaccagattggttatgctttcagtacctcatttacatgcttcgggtcaggcagtgactaggctaaaagaaaactctactgcacatgggcacattggttgtttacccatattcatgggtaaacatattcataaacaaaatcactcccacccattccttaaagtgagaaaatgcagaggtaagccaagaggtaaagtctccaagggtcactagttccactctggttcaattaaggttcaggatctgtatctgcagctccgtgtgcaacctgtccagctcctgcgaccagttccccttcagataattcgataaatctgtacgtttaataaaagaatattaacatacctaatgggagtaatgcacatatgcagggttgatgccacacaactcatttgtaggacatccatcatctgttccatgttatgttgtaaaacatccactctttgattcactaacaataaccctgaggcgatatgagaatcaccacttgtagaggcccaactcgccagcaagaagaacaacacaacaggattcttctgcacacatttattgggagagcttgatagtaaaagcgaaagaccccaggccaaaaaccagtgctgcttatataggcctaggataggcgtgtctacaccagattggttatgctttcagtacctcatttacatgcctcaggccaggcagtgacttggctgaaagaaaactctactgcacatgggcacattgtttacccatattcataggtgtcggcttattgaaatcagcgccatcttgtaatggcgtttattggcttcccacaaccagaggctaggccggcctgcgccccgcacaagctccccacgcccggatccggctgcaaacgcgcaccctccccaccgcaccgcttacccaggctctgcctccgcaacaccgcgtagggccggctttgctccggcggcacccccgggctcggggcctcggctcgccctagcaggaggctgcagagcatgggcaacagccgcatccatcctgagcgcagcatcactgaaacccgcactgcacggagcgcggggacgccgcttccgccttaagccccgcccctagacgttgccgtttttccgaggtccgcccactccgctcgcgcagttgccacggaaacagggcgggtgggggggcgaggggaggagccatcccgaccaacttcgggggtggggtggtgaattatggttctgcgcagagggttccaaagctgtggcaagcgctcgcgtcgggcttccccgtggaaggctttgctttacacattcatacattcatacattttcgtattagtcaatgcagtccgaagaaagagacaccgtaatctcatttttgaaaactgtaagttattttaaacaatattttcttaaatgctttatttattattatatataagcacactgtagccatcttcagacacaccagaagacggcgtcagaaatcactacagatggttgtgagccaccatgtggttgctgggatttgaactcaggtcctacagaagagcagtcagtgctcttacctgctgagccatctctccagcctgaaaagtgtaagttttatgtatgtattttgcttccttttgagaaagggtttctctgtgtagccctgcctgttggaactcactctgtagaccgggctgacccagaactcagaaatcctgcctgcctctgcctctcaagtgccccaaattcatacagatctgcctgcctctgcctcccgagtgctgggattaaaggcatgcactaacatgcctagcctatacaatcatttttaaggtttagtttatgtacatgagtgctttgcttgcatgtgtgtgtgcactgcatgggtgcctggagctggtgaaggctagaagtagtgtgtgttcctctggaacgggagttacagataattgtgaacctccgtgtaagtgctgggaactgaacccaggtcctctggaagagcagtaaatgctcttaaccgctgaccatctcgtagccccttttatacaatcttaaaatcatactggctgatctcactcttgctatgatggtgacataacgtaaaattaatcattttagctacttttttttttttttagttttatagcaagacagggtttctctatatggctctggctgtcctggaactcactttgtagaccaggctggccttgaactcagaaatccttagctactttttaatacaattcagctgtattaggctaaatataaaccaacacatatagaccatttccagaaccttctcatcatctcaaacagaaactccaagcccattagaccataacacaactatctcccctgtccccatcacctagtgacccattttatttctggcccctgcatacttatctattccatatcaataggtcattatcatataagtgggatgtacatttgcctatttgggtttttttggtttggtttgttttggttttggtttttcaagacaaggtttctctgtgtagcccttggttgtcctggaactcactctgtagaccagactggcctcgaactcagaaatccacctgcctctgcctcccgaatgctgggattaaaggcgtgtgccaccacgcccggctctgcctatttgttgaataactattttcgtgttttctaagctaaacggcattgaagattgagtagacacagaagcagatgagactataatgtcaccaaaatcttggcatccggattggcctcttcaggagctacatattcaccttccggaggttggaactttatctcagatgaagaggtgcaagatgggtcgagtgtgtaggaccagaaggcaaataggagaattaaagccatctgtggctaacgtagccatgaaattatggcgagtgatttgttgcagcaatggaaaatacagattaacattcctttcatctcagaaacaatccaga

SEQ ID NO: 906 - DNA, 2209 bp, Mus musculus
cgccccgcactcgcccgctcgccttccttctcccctcgctctccggccggtcgggcgggcccccgagaccccgtcgggtccaggctggtggcaggcgggcggtcaggcccgggtggcggcctcctcgccatgtcctcggcccgcgacaccagcagccgcttcccgctgcacctcctggtctggaacaacgactacgagcagctggagaaggagctgcgggaccaggggttggcagtgccctttcatgctctttatatcatgtgtgtgacaccagtgtttgcttcacagaatgcagaggccttggacccccgggtcttacacgaagctgtgagcacgggcgatcccgagatggtgtacaccgtcctgcagcaccgagactaccacaacacgtccatggccctggaaggtgtacccgagctgctacacaaaatcctcgaggccccggatttctatgtgcagatgaagtgggagttcaccagctgggtgcccttggtgtctagaatatgccccaacgatgtctgtcgcatatggaagagtggagccaagctgcgcgtggacatcaccttgctggggtttgaaaacatgagctggatcagagggaggcggagcttcatatttaagggaggagacaactgggcggagctgatggaggtcaaccacgatgaccgcgtggtcaccaccgaacacttcgatctttcccaagaaatggagcgcctcaccctggacctgatgaagccaaaaagcagggaggtggagaggcggctgacaagcccagtcatcaacaccagcctggatactaagaacgttgcctttgagagaactaaatccggattctggggctggaggacagataaagctgaagttgtcaatggttacgaagccaaggtttactcggtaaacaacgtgagcgtgataaccaggatccgcaccgagcacctaacggaggaggagaagaagcgatacaaagaggaccggaatccactggagtctctgctcggaaccgtggaacatcagtttggtgctcaaggggacctcgctacggagtgtgccactgtgaacaaccccacggccatcactcccgacgagtactttgacgaagactttgacctgaaagacagggacattggaagaccaaaagagctgacaattagaacgcagaagtttaaggctacgctgtggatgtgcgaggagttcccactctccctcgtggagcaggtcatccccatcattgacctcatggctcgcaccagcgctcactttgccagattgagagatttcatcaaattggacttccctcctggattccctgtcaaaatagaaatccccttattccacgtcttaaacgcacggatcacattcggaaatgtcaatggctgtagcactgctgatgagagccagggtgtggaggggaccccggccgaggcagtttccgaggccacaaacttcgaggttgatcagtctgtctttgaaatccctgaatcctaccacattcaagacaatggcagaaacgtgcacctgcaagacgaagactatgagatcatgcagtttgccatccagcagagcctgctggagtccagtaggagccaggacctttcaggaccagcttccaacggaggggtcagccacacacacagctatgaagcccagtatgagagggccatccaggagagtctcctaaccaacatggagggcaggacgaacttgaaacaagaaagggagctaacttagagcagaggctcttcatccaaaagggaaaaatgatgactccacactgctttttagagttcaaatcaacatctttctggaaaaatatattttttaacagaatctttttattatttttaaaagatataaaactgactcctcccatcagtagcaatacaaggttatgcattttaaccagactttctcaggcctcttttggatacctttagtagttaactatttttgtctaaccctcctgtaaatacctactgcataacagcccaacccctggggaacacagccgagggcaccttgcccctctcacctggcgcaggcatccacccccacaaggctgtgctgatcacacggcaaaacagtaccttttcctctgttctctgtctgtttcctgttatgcttctttggggataggaagagaagccaccattcccaggaatgtctgtttgatacagtcagcgttgccagtaaaatgttctgagacacaaag

SEQ ID NO: 907 - protein, 569 aa, Mus musculus
RPARSPSFSPRSPAGRAGPRDPVGSRLVAGGRSGPGGGLLAMSSARDTSSRFPLHLLVWNNDYEQLEKELRDQGLAVPFHALYIMCVTPVFASQNAEALDPRVLHEAVSTGDPEMVYTVLQHRDYHNTSMALEGVPELLHKIAPDFYVQMKWEFTSWVPLVSRICPNDVCRIWKSGAKLRVDITLLGFENMSWIRGRRSFIFKGGDNWAELMEVNHDDRVVTTEHFDLSQEMERLTLDLMKPKSREVERRLTSPVINTSLDTKNVAFERTKSGFWGWRTDKAEVVNGYEAKVYSVNNVSVITRIRTEHLTEEEKKRYKEDRNPLESLLGTVEHQFGAQGDLATECATVNNPTAITPDEYFDEDFDLKDRDIGRPKELTIRTQKFKATLWMCEEFPLSLVEQVIPIIDLMARTSAHFARLRDFIKLDFPPGFPVKIEIPLFHVLNARITFGNVNGCSTADESQGVEGTPAEAVSEATNFEVDQSVFEIPESYHIQDNGRNVHLQDEDYEIMQFAIQQSLLESSRSQDLSGPNGGVSHTHSYEAQYERAIQESLLTNMEGRTNLKQERELT

SEQ ID NO: 908 - DNA, 60553 bp, Homo sapiens
tttaagacctgcagtttgaaaacatacattagttattataatggctgggactccagagtacctgctttttatagtagccctcttctctgtgtaattgtctgaactgatttagcaactttgggagaaagcagcatttagtcccatcttataagtgaggcaacaggcagacgggtgcccagacctagatttctggtctgatcgcctcttatttgagtataagtttaaatctgattacatttacagactccaagccatggtttccaactgaggaagccacttactcctgctgggtggccatgctaaacagatggtcctgccccaccccattctgcatttctaatagcaaagaacctgatgcacaactagggtaaccccctcctctgctgcccttgcggagactgaccaaaaatagctgcactcctttcagtgggccccatttgttatgaagaaataaaagtatttataaacattccactcactgtactttatcctgtggattagctttacgtcttccactcataatagacgcagggtccagcaaagaatgctcccatatagagttagcaccgttattatacaaggtctcaaccatctaaaaccaagcaggatgacataagactttaatttcttttcacaaatattcaatggggatcagtgactgaacagagtaaacaaagtcctgttataaacactcatttgttaggaatatcattcatatcattgttttctgatttgagaatgagaaagatgatcaatctatatgcaggattcagctttgactagtaggatagttaaatacctaaagtgtgactgaactgttcttattctgtatgaaagaaaaaaaagtactctgacaccttagagcagggtttcccaaacctaattaaacactattttcaacattcttaatgacccatgtactgtctatattattcacttaatatttgtctttaaagccacttacttgtaaaaacaactacagtttgatgtgctagttatagctttcccatacacagtaaaataatgtaaccattaaaaaaaacatgtattacctacatctgtcttgaataccactggtggttccacatttggggaattgttgctttagggtcaaccctggcattctaaacaactcatctctggactttactgagactctgtactacaatctggctttgcaaacacagacagacctgagagcagtaaacagcccctttcacatgagcgtgagcggttagaaacttctaagcaaaagttagtaataaatcatatctccaaatttcatttcaaggcatgactcctaaaacagccccatctgttttttacagcagtgtagttattttcacatcagagatacaaacccacttgttttggctccttggttcacacagccaagtttaagggatatgtgcagctgtcacagattcagtgaaatgtgtaatcaagacaaatgaaggcaaaacacacacttaaccttgagttccaagagaacttgaagaatgtgtaccccaagatagaagtaaaggtgacatgacattggactccagataaaacaaagaactcatttaacagggtattctacatgcaatcaaaacatattaatttaatttggtctctctgactagtaacaagagctttaagaaaacttaaaatgtttcagaagtttctgaggaatcccagcccatgctgctatcaaagcagaaaaacatgttctaaaaatattagcaggtactcaggaataagtacattaaagaaaagattctcaggcagtagccttcagaaacattcattatcatgcatagaaaagatggactactggccgggcgcggtggctcacgcctgcaatcccagcacttcgagagaggttgaggtgtggatcacttgagttcaggagttcgagaccagcctggccaacatggtgaaaccccttctctactaaaaatacaaaaattagccgggcatgatggcgggtgcctgtaatcccagctacttgggaggctgaggcaggagaattgcttgaacccgggaggcggaggttacagtgagctgagatcacgccactgcactccagcctggatgacagagtgagagtccgtctcaaaaaaaaaaaaaaaacatttccgatgacagtctagaaagtcaacagagcaacagtaccaagatattttaatgactattcatctatctacctataattgagcttgttgaacaagatttatgtcaagtaggaagaaaagtctttactgaattcaatacagataatatttgtaaatagcattgatgggcatgccatctctattcaattatgaaacagttttgtcttatggaagaagtacaccaggagaaatttaagttattaacatgatgagccctaaaatgtaaattaccaactgtcaggagaattcttatcctttacctgaagcagtgttggaggccacggtgtgtgtttcagatgcctcacttgggagatatggcgccctagactccgatggacactgcagcactcatcacataaaaacgttcccctatttactgatgcccaggaaggatctggaaagagagtgaaatctcagtggcagggataccagcaggttgctataccgccagatggcaaaagatgactgaagtttggtttgtcagaaaaaggagacatttttgtttcagtatgctcatcaatgcatcaggctggtcatcttgttggatggtatgacctaccttggctgattaggtacaatgttaattgagactaaaaacaccagtgggagccttgggtaaacagttatcttctttctggttcagggccacagtttgtagccctaatgtggatctaccatttcagatgcatgctttttcattcaagctaagaaagcaaattgagagggtacagacgaatgattttggatccatctccataaaaatcaagataatacttttttttttttttttttttttttgagatggagtctcactctgtcacccaggctggagtacagaggcacaatcttggctcactgcaacctctatctcccagattcaagcaattctcctgcttcagcctcccgagtagctgggattacaggcatgcaccaccacgcccggctaatttttgtatttttagctgagacggggattcatcatgttggtcaggttggtctcaaactcctgacctcaggtgatccgcccacctcggcctcccaaagtgctgagattacaggcgtgagccactgtgcccggccaagataatataattttgacagtgaattatgcagatagcattttctgcagtaaatgttgtagactgctgtcctaattcactgctatgaatcaacatgtcaatatgcttagcagaaagctgcgagttacagaatcataaaatcactcagctgctatggttctgaggacagggaaacctggcctcttccattaggaaatgttctatgatgtccatgaattggtttgtttgtctgtttgtttgttttgagacagagtctcactctgtcccctaggatggagtgcagtggcgcaatctcggctcactgcaacttctgcctccagggttcaagcgattctcctgcctcagcctcccgagtagctggaattacatgtgtgtgccaccagctcggctaatttttgttatttttagtacagacgaggtttcaccatgttggccagactggtctcaaactcctgacctcaggtgatccactcacctcgacctcctaaagtgctgggattacaggcttgagccactgtgcccagccaattaattgttttacataaactaccaagtccaatcctgcaactgatctgaaaaaaaaaaaagaagttgcaataacagcagcttcacagaggcaaagatgtaaaataaaaatgaataatatttttagtgtgtgtataatacttttttccctttaaagtcatagagcttcattagctgtcctttgaaacaaggaataatttcatacttggcaagcaggatggatctgggtaagtaaactgaatacctagaaacctcaaataaagaaagagctatacttcgtcagactcacaatggggtgacaataggtgccacttaagctgcctggtcaaagggttacatttaaaaattcttcaatgtccacaaaaatctctaaaatgcatgtacaccatctttaccattttttaagagtttattcaaaccctttcaaaccatataatgaaaagttatgggctttcaatcaaagacgaatcctgggagccagtgagtatggtggttaagagggttggctctagagacaaggagttcagggtttgaaccccaactctgccacttcttgcacaatgatctcagacaagttacttgagtgttttcaccatggttcaaatgagaacaatgacaaatctcgggatagtaaggatatagagaataagtgaagtacctcacacatagtaaagtagtaatgttagttgttatatcttttctaaattattttctcagtattcagatattttctagacgtgaaattcatgatcactggacaaagtttttgatgggaaatacttaaaacattgaacatttcatgtgaccactctactactgtactgaaaatctccatggagttttcaagtaattgaactcagagtgtgatgtatttgaaatgaaccagattcattaaaaaaaaaaaagtagaatatttaagaagatgtgatcatggttaaatgtttgcataaaataaaacagaatcaaaataattcaatttagtataactctgtcgctattactgtatcatcctaaaaagcagagattggaaatgtccagatgaaggagctctacaaagatgcattaacaacactgcttcctgcagtatagtactgacactaatggcaaaaaaaaaaaaaaaaaaaaaagactgttttgaagcatagctttggttttcacttattcagaggatttgcagtattctttttttagcaagtatttaacacatattaattaagacaagtattcgactaaccactttagcatcctggatcagaatcccatggaaagaatattagaatgttaacatagtaaaataaaaatgtttgtatgaatgagattgggtaaaaccctttaagttcatctggagccagggctccagggacaccacaaatgaacttcaaaaatgtttgtgactcccccagacaaatcttaggtaaattcgttcacgtgcattttaggggagaaggccttagcattcaacagaatctcaaaggggtccctaaccctacaggtaattctctcagtagggctgtgcagaaaaggcagcacaaattcccagctgctcaatttcacagaatatttcaaggtagcctaattatattcaaaacaggaaggaagtgactcaagtctctgcagattaggcgtatgagacaacaactaaagcgatacaatggaagagaaaatgttctgaaatgcacaaaatgctgcaaaagtatatttaggatggcaatggaggaacaattttgctttgccctgtaccctatcaagaagcaaaacaatatgcattccaagaggaagttagaagctagacacatgtgaatcaaatacatcacggtaagttcaactgaaaataggcaagaaaataaggaagtggaacaaataacatttttagagaaaatgatggagtttgtataactcacactaacttggtttagaaaacacttctttttaaactcctccataccccctccctatcttcaaaggaaactggtaacacctgcactgtacgggccataaaacaaccacatgaggtttgagttatcacagttctatttacaattggtctccacttccaaatgacaagcttaagatcagaacagttgcaaagccagtggtgttcaatgatttaattaagattgtttatcggacactattgtgccaagaaagccatgttaccttcgaattaactcaaagccaatacatccaagcacctaaaacagcatgtaataatctatccagagacctgacaattcagttgcaattgctaagacacacttgatctctaaatgtgaatattatgtatgaacagttatgcatcattatgaaggaatggctttagcgtttcaatgcccctatattgctggtgattttgcgtttgtttccgttgtaatcaacgtatgatttagatagtcaaatatagctttaagggactacaagagttctactgtagacagcataatgcaaaaaagaaaagccttagatgatatgattctacgagtattcattgaatcttcctcaccactaagcgtgatactcccgattatcctcattgaaaaaaatgaggaaatcaagcaagtgaccaagtgaagtcaccagcccaaggtcagccagaagcaaaatctagtttgaacccaggccgttcagatcctcaaacttgagacaagcactgcctcctaagtgctggttgtgtttggaagaccccgatctcctggcaattctcccgggcagagtagctgtcggatgtcagcagcggggaagtcatctacggggaccctctggcgagtctcagggagtgtcatcctccccgggcaggacacccaggcggagaaagggtctagtgggaggtgacacctgcagcctctggaggctgcagccgggaggacgctcacattttacttctgtaattggctttcctgtggattgcccaagccccttcctgttgggggagcagccctggcccccgtcacctccccagttggcctaggacggagggaacgggagggaacgagagggaagggagggccgcgagggacggggagggcggcggccccctgcccgcccggctctgacaggcccgggacggttcccaccccaaggccgcccagggacctcttcgttgcgaccctagccgcgggatgcagcctgacctgagggggcggccccggggtaggggtccgggccaggaaagcagaggggagcgggcccggccggtgcgactcacccggcccgctgcagtcagcgcacacctcgctgctccggagccgtttcgacatggctcccacctcccacctgcggggaactagaggccgggggacagcaaaggcggcggtggcggcggcgcttccgctctaacgggtcccagctgcggcggcgctgacggcggcgcctctcccctcagcgccttgcagccttggcacagcacgcacgcgcggggaggtgcccttcggcgagtgtcaggtcatgtgaccggaaagggcactctgccttgtcgccatcttgagtgagggcaggagactgcccgagtatcatctgtcctacctttaaatattgaatttgggtcttcttctctggcagagattcccctcgtcccaactgattaataccaggggaagtagcaatatcttgtgatgagaaccctgcagccacaaccttcctgaggcaatcaatggtcaagttcattcattcattccttgattcaacaaatgtttatcaagcacttaccatgctttatatactgtcccagccactggagaaacagcagtgagcaaagactgaatttctagtccttatgaagcttgcattttactggggtaaagtaaaataagaatatattatatgattccaggctgggcgtggtggctcactcttgtaatctcaactctttggaaggctgaggcaggaggatcacttgaggcaggagttcgagaccagcctgggcaacatggtgaaaccccatctctactaaaaatacaaaaattggccgggcgcggtggctcacgcctgtaatcccagcactttgggaggccgaggcgggtggatcacgaggtcaggagttcaagaccagcctggccaacatggtgaaaccccgtctctactaaaaatacaaaaattagccgggcacagtggcaggagcctgtaatctcagttacttgggaggctgaggcaggagcttgaacccagggggtggaggttgcagtgagctgagatcacgccattgcactccagcatgggcgacagagtgagactccgtctcaaaaaaaaaaaaaaaaaaaaaaaaattagccgggcgtggtggcgcatgcctgtaatcctagatactcaggaggctgaggcatgagaatcgcttgagcctgggaggtggacgttgcagtgagcagagatcgcgtcactgcactccagcctgggggacagagcgagactgtctcaaaaacaacttcaacaacaacaacaaaaataacaaaaaagaatatattagatgattccttaggcttcagttttaatctcatgttcaaaattaagataatgcattgtttacttctagtccacgatttgtttttgtatggcttgctacttaagaatgatttttacatttttaaagggttgcgagatgaaaatgaagaagagagagagggaaataaagaaaaagaggaagaagaatatgcgacaaaacttgtatgtgaccagcaaagttaaacattcattttggctaaggacagatggaataaattatgggaaaaatgtgatacacctgctggatagtaacccctcagtaaatagtagctcccataattatggatattgctattattttctaattactgtttttcttcatatgcgtggaatttgagaataacaatagctaacatgggataatttacaaaatggtgtgagataaacacaatgaaatgaggtaaatcagtgtgaaggagaaaggagatgtgaccctaataccaatgactacttattgtctgtcttacatataaacacagctatgatctccattcagcaaatattgaatgcctgttgttagccaggtactattttggttttagatactctggtaagcaaaacgatgtggttcctgtcattatggggttttctgattaatgagatagggagattttcaataaacacggcatgatgaagaagaaggagaacgttaagttgcaaaaggcatctgaaagaatgagaagtgctggaaaaggcctcagaagcactggtcttgagtccatctctacagtgtgataaatgtgtgatggagaaataatcacagaattcccacgcattccatggttagagtctccgggtgccatcctggtgctcctgcatcctgttttggtttaacaactcacaaatcttctgggctccacatctgtggagaatggattaggttgggattcttgaacagctgttgttgcaggcatctgaagagctggatgtgcatacactcagagggcagagggaatgttttcacaatgcattaaatagcttcatccagctatgtggtctagttgtagacagctgagctgaagcagcagcagaaagttcaagcccatgagtagctagctgtaagttgatttggttcttcattgagtcaaggaggcatagtgcctgaaactcaaagaataaacttcatattcgcagactgtggtcaaatatgtatattatttatcagtcctttcagccataacctcaaatccaaaaagctagcttaaaaatgacattcatacatggactaaatcaccaccatagttagctattgaatcataacccggttcggagttcaaatagaagcggttctcaactgaggacgatttttctccccgagacgacatttggcaatatctggagagacatgttttggggagtgctactggcattgagtggggagaaagaccagggcaactgctcagcatcctacaaggaccggacaacccccacacaaaaactgcccagttcaatatgtgccgaggttgagaaatcatgaagtagaaatatccccttttatgcaaatactgtatttgaagccacttcgccagggtttagcgttcctccttcaaaaattgtccggtgttgcccacttccaaaatggcttttgacccgtcgtggaagcatctgtcctgctccaaaaaggctgcaagggtgtcggcagctggaatggtttggtccggggctcagttgtcaccccctgacttcagagccaatggaagaggcccagttgtggaccgaaccacatggggctactggagcagggggaaagaagctggggacaggtagacggaactttccgcgtggagatctttggccaagagaatgagcctcagctctgttctgtgggctgcactgagtttctcggtgtgagctggaggtgggtgcaatggcgcggaccccggacccggtgcccaaggtcgcctatccccgccgcggcatgcggtggttcgctctccgcacttccctgtttggggcagttaggtccgcagaagtctgtccgcgagctgtcagcgcgggcgggaacgccgcggggcgcggggtgggcgcggccgacctggtccctgagccggccggcgaccccggacctcccgcgcgccccgcacccgaccggctcagccggccggcagcgtaacacgccctacgctcgcttgctcgccggcctcagggcaggcaggcgggcgcgggagaccccgccggggccgagacttggggcgggcgacgaggaccaggttacggcctcctcgccatgtcctcggcctgcgacgcgggcgaccactaccccctgcacctcctagtctggaaaaacgactaccggcagctcgagaaggagctgcagggccaggtgaggggcggggcgggggtccgtctcccggtggggacttcggggaatcgggggtcgtttcgcctccctgagcccatttccagccctctgtccccgggatccccagaccccttccactttgcaggtgtgggacagtcctaataataggacacgtatcgagtgcttaccgtgcgacgggctttttaaatatcttctctcttcacctttccaataacgctggtgggtaggtactgttacttttccactggacagagaaggaaacaggtcctcagacgctacgtgccttgtgcgaggccgccccgctgataaatgccaagtcgggattttaactcgggccggctggctccggaatgcaccgtcttaaccatttttaggttctgctgcctcaaagacgtaagaatagcacactctccttgttgtaaggaagggcttggttggttttggagtccaggttctaactcgccctgtgaccttgggcaaggcattttccctctctggccgacgttaacttagctgtagaatgaggatgttggtgctggggcagaacccaacacttgactctattgataggtctggggtgaggtccaggtgccgcatttttaacaaactccccagggaggctgatacctagcaaagtttgagaatcacgggttctcaggctccttaaaatcccttcctgttctaaagtgctttgatgctttaatcttttcattattgctatctctttaaagcagtagtgctctcagttggaggtgattttgcacccacgaccccccggggacatttggcaatgtatgggacatttttggttgttgaaagtggggagtgggtgcttctggtagtgggtagaggccggttatgctgctcaacatcctacaatggccaagacagccccccgcaactaagacttctccggcccccaaagccgacagcgtcttggttgagaaactctgcttttctttctttccttctttttttttttttttttttgagactgagtttcgctcttgttgcccgggctggagtgcaatggtgcgatctcggctcactgcaacctccgcctcctgggttcaagcgattcttctgcctcagccccccaagtaactgagattacagggatgcaccaccacgcccggctaattttgtatttttagtagagatggggtttctccatgttggtcaggctggtctcaaactcccgacctcaggtgatccgcccgcctcagcctcccaaagtgctgggattacaggtgtgagccaccacgcctggctgagaaactctgcttttaaagtctcccaacaattctgggaggtattggtgccctcaagtttcaagctaacaaacttagcagttaggatgaggatttgtgattacccctgaaatctagtatggttgttcttgttgacttcatacattttatccagtgtcttacagacctggtttttgaatggctcaaaattggtgctataattgtcaagaaattgtagaggaagaggaggattgtttgtcttatggttgacaaaaattgagaaggttagcattactccatttggtgaatgggtgctgcaagctgtgtgcttgcaacctgccatatttaaggtggttgagccctcaccgaagtccaaaattaccctcttttcttttctgtttctttttttttttttttctttttgagatggagtctcgctctgtcattcagacttgagtgcagtggcgcgatctcaggtcactgcaaccttcgcctcccgggttccagcgattctcctgcctcagcctcctcagtagctgggattacaggctaatttttgtatttttagtggaggtggtattttgtcatgttggccatgctggtttcaacccctggcctcaagcaatccgcccacctctacctcccaaagtgctgggattacaggcatgagccactgttgccggccttttttcatttaaaaagaattccagatacgataaacttttgtgagagtcatcgttcttaattagatgacagaccaactatttaagagttaaggagatatgacacatgccctcagactaaatgattcaccattaggcattttagtatactgatcatttaattccttttctattactagacatggtacagaggtaaaaactgtaagactcagctaggacactttaaaaatgaccagttttggtttttaggaatctacttcttttggtgcccaggctggtcttgaactcttgtactcaagtgatctgcccgcctcagcctcccaaagtgctgggattacaggcatgagccactgtgccttgcccaaatcctgtattcttaacccctactatacttctttcagtaaaaatgacttcatttcaagattatggagaataaataaggaagataatggacctgaaagtgcaggcatatggtaattggaaacaatatttactagtagctgctgctattataatcatcatttgtaaacctggggattgagcttttttgctctatattccagtttttctgcaaggaagatgtattgattgcataattaaaaacaaaaaattcttaagtccgggcacggtggctcatgcctggaatctcagcactttgggaggctgaggcaggcagatcgcctgaggtcaggagttggagaccagcctgaccaacacggtgaaaccccgtctctactaaaaatacaaaaatagctggatgtggtggcacgtgcttgtaatcccagctactcaggaggttgaggcaggagaatcgcttgaatccaggaggctgaggttgcagtgagccaagatcgtgccactgcactccaggctgggagacagagcgaggctccgactcaaaaaacaaaaaaaacccaaaaaattcttatcaccccagcaataaagtggctgtttcccttaatgttttgtttgctggtgagtttctgctgtcagtttcctcattccgtctatcacctgattgagacttggagcatgtatactgatagctgtaagaatttttttccaggttttttgttcctgttccaggaacagcaacacaagaaagaatcaagtttatccagatgaagaggataagcacgtgtttctgtgtgtgtgagccagccccaatcccactgtctcactaatagcaggcagttgtgtaactatgccaactaccagattgtttcaggccttcatttgatcagcagaggcatttaataaagtgcctcttaacccatcagctcattaatattcagtggggccttgaagttggttgctgaagttgaaactgtttgtgttctgcttatgtcgttggccgcttagctaaagaagtctgttaaacttctttggccttcttactgatggtgagacatgaacacttaaggggacagatgcaaaggtgagtcagtgtaccttagacagggttggaaaacctgggttgtgtgaggtggagggtggcaaatgaggcctgactctagagccaggctccctgtttaggaagccagcaggtgaaaagtatagcacctaggtaagaggaggacattcctggggttctcactccagcctggggcaggccaggtgaggccccgggcacagattcaaatcgctgagccatgggctaggcatccaagatgaagagcctagagcctgctctcctcatgtgcccccttggtcatcgggggttcaagctcaccttaggaaactggcctcaagattcctgtttccactgactcagcgtgggggccacacaggaccaggatggtctgagagtgaagaggagtgagggtggttgtctgtgttgagagagaggaggactagccagcagcctcttgctggagtccccctaaaggtgacagtgagtttatgaagcacttcctgcatgccaggtaccaaggcacaggggaactgataattcacctgaggctagtgggcaagctggaaggggtgtccagttgtctggttctgcagcctggcctcagagctcggcaggaggatggcaagatagtaaagagggcttttgattgaggaggctgaggtggggtcagtgcttgaggacaggagttcaagaccagcctggccaatatagtaagactccgtctccttaaaaaaaaattttttttggctgggcacggtggctcacgcctgtactcccagctctttgggaggccaaggcaggtggatcatgaggtcaggagttcaagactagcctggccaacatagtgaaaccccatctttgctaaaaatatgaaaaattagctgggcatggtggcgggtgcttgtaatcccagctacttgggaggctgaggcgggagaatcgcttgaacctgggaggcggaggttgcagtgagccaaaatcgcaccattgcactctaggcccggcaacagtatgagactccatctcaaaaaaaaaataaattttttttaaggcttttgagcaagaaaagtggatgagctgaaatgagcaaataggaaggaaactcctagttaaaggaggatgggtatttttatttgggtatagctcatggctaaagaaacttaaaaggaaaacctaaatgatcagtttcgaaagtgaattccagccgggcgtggtggctcaggcctgtaatcccagcactttgggaggccgaggtgggcggatcacctgaggtcgggagttcgagaccaacctgaccaacacagagaaaccccgtctctactaaaaatacaaaattagccaggcgtggtggtgcatgcctgtaatcccagctacccgggaggctgaggcaggagaattgcttgaacctgggaggcagaggttgcagtgagccaagatctcggtgagctaagattgcaccattgcactccagcctgggcaacaagagggagactctgtctcaaaagaaaaagtgaattccagctaaattctgaaactccttgttctctgaactcatattattagttgaagattctaagccccactaataactgtaatgcaatttgagcaaatcccttttagggagaaagtgacagctatatgaaactacatagtgtgggcgtatgataataacaggtaactcttctcagcacttactgtggtgtcaagcaccgtgctaagttaaggactttccccttgtaagaactgtaaggtaggttttttttattgttcagttttacaagcgagcaaactgaagctcaggaggaattaagcaacttgtcaaacagtacatgagagattcgttttatgtattatgtataaacatatacagattgattttttcaaaagatttttattgcgatatagttcacttatataatctacatttaaaggttattcaatggtttttagtatatctgctgagttatgcaactatcactactgtcaaatttcagaaatttttttctttttctttcttttttgtttttttgttgtttttgagacagggtctcactctcttgcctaggctggcaccatcacagctcactgcacccttgaccttctcggcttaagcaatcctcccacctcagcctcccaaatagctaggactgcaagcaagcactaccacgcttggctaatttttaaagatttttttgtagagaaaatgtgtccctatgttgcccagactgggctcaagcagtcctcctgccttggcctgccaaagtgctaagattacaggtgttagccactgcacccaccctgtaatattttcctcacccgaaaaagaaaccccatacctgtagtagtcactcctcatttctccccaacccctccagcccaggcaacctgctaacctacttcctgtctctagatttgcctattctggacatttcatataaatagaatcatatgtggccttttgtttcttcttttacttagcataatgttttggaggttcatctacgttgtggcatgtttcaggtgcttaattcctttttatcactgaatatattccattgcatggatgtactatgttttgtttgttagacgaaaatgtttctccgtttgtcagttgatggacatttgggttgtcgccactttttggctattatgagtaacgctgctgtgtgtatttgtgtatatgtttttgtgggtttccttttttttgagacagcttgctttgttgcccaggctggagtgcagtggcatgatctcagctctctgcaacctctgcctcctgggtttaagcgattctcctgtctcagcctccctagtagctgggattacaggtgtgcaccaccacgcctggctaatttttgtatttttagtagagatggggtttcaccatgttggccaggctggtcttgaactcctgacctcaagtgatcagcccaccttggcctcccaaagttctgggattacaggcatgagccactgcacccagccccatgtataagtttttgtatgggtatatgttttcatttatcttgggtatataccttggagaggaattgctgggtcatgtagttactctatgttttaactttttgcggaactgccagcaatttttcgaagtggctgcactattttacatttccaccagcagtgtatgagattccagtttcttcacatccttgtcaacacttggtattatctgttgttttgtttgtacgcatcctagtgggtgtgaagtggcatctcattgtggttttgattcgcatttctcttatgattaatgatgttgagcatcttttcatgtgcttattggcaatttgtgtatcttccttggagaaatgtcatctcaaatcctttgcccatttaaaaattgagttatttgacttgttgagttgtaaaggttctttgcatattctggatagtaggcccttatcagtatgtgatttgcaaatattttctcccattccatgggttgtctttttttttttgagatggagtttcgctcttgttgcctaggctggagtgcaatggtgtgatctcggcttaccacaacctccgcctcccaggttcaagcaattttcctgcctcagcctcccgagtagctgggattacaggcatgcgccaccatgcctggctaattttgtatttttagtagagatggagtttctccatgttgatcaggctgatctcgaactccctacctcaggtgatcctcccgccttggcctcccaaagtgctgggattatagggatgagccaatgagctcagccaaaattttgttcttttgcatgtagatatgcagttgttcaagcggcacttgttgaaaggacagttctttcccaatgaattattttggcacccttgttgaaaatcaattgaccataaatgtgtgggtttatttctggactctaaattgtattccattgacctgtatgtctgtccttatgccagtaccacgttgtcttgattgctgtagctttgtgtagtacgttttaaaattggcaagcgtgaaatgtgagtcctcagacctctctcttcaaggtggctattctaggtttcttgcatttccacatgaattctaagatcagcttgtcaatgtcagcaaaaagccagctgagattttgataggagttgaattgaatctatacctcagtttggagagttttgtcattttaacaatattgtcttttaaaccatgagcataaggatgtttttcaatttatttaggtcttctttaattttttgaggttttttttgtttgtttgttttttgagatggagtttttactattgttgcccaggctggagttcaatggcacaatcttggctcactgcaacctccgtctcccaggttcaagcgattctcctgcctcagcctcccaagtagctgggattacagacatgtgccaccacgcccggctaattttgtatttttagtagaggtggggtttctccatgttggtcaggctggtctcgaactcccgacctcaggtgatccgcccacctcagcctccccaagtgctgggattacaggtgtgagccaccacaccaggccagttcttctttaattttttttaaacaatgttttatggtttaagagtatgtaagttttatatttattgtgtcatatttattcctaaatgttttattttttgatgctattatagatggaattgttgtcttaatttcatttttgagttgctcattacaagtatgtagaaatataattgattagttattgatcttgtgtcctgaaaccttgctgaactcatttaatagttctaatagttttttggtggattccttaggattttatacacaagatcatgtcatcttcctttccattctggatgctttttatttatttttcttgcccagttgccatgactagaatctctagtacaatgttgactagatatggtgaaagaggacatcctcatcttgttcctcatcttagaggggaaacatccagtctttcaccattaactatgatgttagttgtgggttttttagagatgctttttgaggaagtttccttttattcctagtatgttgagagttttggtttttttcttttaatcatgaagggatgttggagttttgtcagatgtttttgctgcagctgttgagatgatcatgtattttgttttatcctatgatatggtgtaatacgttaattgactatctgaagttataccattcttatatttgtaggataagtctcagttggtcatagtgtataataccctttttatatgttgctgaatttagtttgccagtatatcgtggaggatttttgcatctatatcataagagatattagtgtgtggttttcttttcttgtgacgcatttgtcatcaggataatagtgggttcataaaatgaattggaaagttttccttcttcatctatttattggaaaagtttgtgaaacattggtattaattctttaaatgtttaatagcattcaccagtgaagtccaggcatggtggctcgtgcctgtaatcccagcactttgggaggctgaggtgggcagatcacatgaggttaggagttcaagaccagcctggccaacatggcaaaaccccaattttactaaaagtacataaattagccaggtgtggtggtgggcacctgtaatcccagctactcaggaggctgaggcacaagaatcacttgaacctgggaggtggaggttgcagtgagctgagattgtgccactatactccagcctgggcgacagagcgagactcagtctggaaaaaaaacccatctgggcctgcattttttttggtgggcagttttaaaattactaattcaatctcttgttataaacttattcagatttttggtttctttttgagtcagttttgctagtttgcatttctgtagggatttatcttgttcatctaagttgtctaatttgttggcatacagttgttcatagtcttcttttattttattttattttttgagacgaagttttactcttgttgcccaggctggagtgcaatggcacaatctcggctcaccacaacctccgccttccgggttcaagcaattctcctgcctcagcctcctgagtagctggggctacaggcatgtgccaccacgcgcggctaattttgtatttttagtagagacggggtttctccatgttggtcaggctggtctcgaactcccgacctctagtgatccacccgcctcggcctctcaaagtgttgggattacaggcatgagccactgcacccggcccatagttttcttttataatcctttttatttctgtagagttgctaatattccatctttaattcctgattttagtaagttaagtcttctctcttttttccctggtctatctaactaaatgttcgtcaatgttgttgacattttccaagaaccaacttttggttttgttgattttctctgttgttttctcttctctattttactcattccccctctactctttatgcacttattgttttaaaatcacactgtcatcataatacaattacagcattttttttcgactgcctcttcagatgagagagatgcaggaaggtctgaagagttacaattatccaagaaatgtgtgctgctctgtggcttatccataggtgctcctctgtggtccgaagtagaaaaaaagttaacatcgtaatgtatttggcttttattttgtacatcatctctaactgttgcccaggagtttgagtgttttttgtttgttgttttgttttgttttgtttttgagacggagtctcgctctgtcacccaggctggaatgcaatggcacaatctcagctcactgcaacctccgcctcccaggttcaagcgattctcctgcctcagcttcccgagtagctgggacaatataggcactcaccacctcgcctggctaatttttgtatttttagtagagatagggtttcaccattttggtcaagttggtctcgaactcctgacctcaggtgatccacccacctcggcctcccgaagtgctgggattacaggcatgagccaccgcgcctggctgagtttgagtgttaatccttactctgcgcttttagttttgctctggggtgtgaattgtagtaagtagtttcccctttcccatgataaacatttttacacacctcccctgtggcaggtagtatgctaaacctagcacctttcatttagattgaatttgttaggtaagaaaatacttagtttatgtaatagacgtgtaggaagataatgagtttgctaattatttctttcctgctaaacttcaactgaatttatagttcataagttcatcgtcttgttacttttaaaaaaatatttaatgcaagttagagactaaggtaagagaatctagaagatattaatatgacttggatcctaccctttggaattctccatctctttggtgcgatggacaagtcataaccttgggaagagtcagggaatcatgggaggtgtgtggactgggctccaggagacaggaaggtattttagcaccgggggaacactgaggcctgggattggtccaggaggacttatgttcagctagcagatgtcttcaaccacgtcccttattcctcaataagagttatcttcactgtataatagccatgacatagttttcgcaaaacagggaggtttgatagctattggattgtggtggtttacccatgctcctgcttcactttcctaagtggcactttctgcgtatcttcagagactgcaggggtagttagtacctgaataacagctagcatcttaaatcaaaataaagcacattttctaagatgtattatggcatttaaaaagtttttacaggctgggcatggtggctcatgcctttaatcccagctactagggaggctgatatgggaggatcacttgagtccaagaggtcaaggctgcagtaagctgtgatcacgccactgcataccagcctgggtgacagggtgagaccttgtttaaaagaaaaaaaaaaaaaaggttgtactttccaaaagtccatggcagtttgttgtattcttggaagaactttcagagtcacattttttaggcagtgcccaggcattgagacttagctcacactagagaaattgctgcgtggctctggacacgcggtgcaggtgccaaaaggggggcgagagtggcagaataggaacgaagaggtaagagccaggtgtgcatgtctagcatggggaagaaaacccttgatgggatggatggaagtgacgcatgtgcacttgcctatttctttgtgagtagatccgcatacgtgcccggcagatcatgcttgcggtctgaaggacccacagatgctgctggagtttatgtgctacttcaaggcacgtggaactcaatacacaataatgagagtggtgttttggtgggaatccagctagagaatgtaattttattctgacccaaattatctgtgctttcagttttgattaaggtcctatacttcctattctagacttgaatgctgatatgtgcttgagaaatcccccatgttcagtgttgtccggtgattgcatttcatgaaagctcctggccttatttagacttaatttgagtgctgttgagagcttaaacttgtgttggatgatctggagcctgttgccaacatttatttattaggcacttaactttatagaaaaaggaattcagtaactatcaccttcatatataatccccaaattcatattttaactgtgcccaaatgcaaacataccttcttacatgtgttgctctaattaatgcataaatatgttttctattttttgtacttgaaatatctgtcaagcacatttccctattttaatgtaatacatccaattatgtaaatgccagtgtttccttcacagaatgtggaggctgtggacccacgaggtcgaacattattgcatcttgctgtttccttgggacatttggaatctgctcgagtcttactccgacataaagcagatgtgacaaaagaaaatcgccagggatggacaggtaagtatacttttacaataatttaaagtccgtctgagcaccatggtgaaaccctgtctctacaaaaaaatatgaaaattagccaggtgcggtggtgcatgtctgtagtaccagctactcaggaggctgagggggtaggatcacctgagcccggggaggttgacactgcagtgaactgtgattgcgtcactgcactccaccctgggcaatagagcaagaacttttctcaaaaaaaaggtcattcattttagtttctgtttctgaataaaggccagtctcaatcatacttttccttggagtcatctttatcttaagatttctctcttgggacaagggatggggacaaggaaatgggagcccaggatgatgcaggttgcgtcccaggccagaaaccctcggtagagaatgactcctcatccagaaacagctctcagtgcaaacttcttccaccatacacgaatgtggaggccagttttcccctgaggaatatggttacctccattgaatccatcaaaataggcaaaaatcaaaaataaattgtggctaaaagtagcctcttcctgggaaatcctgtcacttcacttgtttgtaagctcttctaccattggccagagtaattttgtgttgactgagcagggatactgtaggccaagccctgcctgccaggtctacatataaccacagttacatgttgtgtgatcgtatagttaaagccaactgtctaaacacattatcaggatttcgcaaccagtggtaagaataggggtcgggagaggtggacggggtttgatcaaggtgctaagggtactctatgttttttactcagtgaagagctagcaatcagaagtcatgatcatcctggtaaggttggactgcagcccttttcttctgaagaaaatactggtctttgatctagatactttttcagcctggttttggaatttgtcagaaagtatgagaattaaatttcacccttttgttttctagttttacatgaggctgtgagcactggcgatcctgagatggtgtacacagttctccaacatcgagactaccacaacacatccatggcccttgagggagttcctgagctgctccaaaaaattctcgaggtatccatgaaaatgtggccaggccataatctgagctaaatgctgatacaattactggagacacagtttgacatccttgtgtgccttcctaaagagttttctgattcgtgaatatgaaatactcaataccaatcacattattccttgcccttctaatttgtggaaatgtgagttcttttacaaattacacttctaagtcactgggcttacccttttaagtactatttaaaaattataattgagccaggtgtagtggctcatgcctatattcccaccactttgggaggctgaggcaggaggatttgctgaagcccaggagtttgagaccagcctgggcaacaaacaaagcaagactctgtctctaaaaaaaaattagcagggcatggtagtgcatacctgtagtctgagctacttgggaggctgaggtaggatgatcgcttgaacccagaaggttgaggctgcagtgagccacccctgagtgagggtgcagtgatcgcacccctgcactccagtctgggtgacagagcaagacctaaaataataataaatataataatataataataaatgataataaagtaaaaattagaacttaaggaaaatggacatcaaacagttaatttgtttaggtgcctgttttcttgaaagtagcctcctgagcatctgtaatcttaggaaagttgtgataggtatcacttactatgcagggattttcagattctgttaaggctcagaggtctgtgtgtaacttctccttgccaggcttgtcacttcagctattagtatttcgagacctttagtccattgccctgattcatttatagagaaaaattaatagctctatcgagaaaaggaacaactttattataaataagacagtcagctgggtgtggtggctcacgcctataatgccagcactttgggaggctgaggtgggtggatcacgaggtcaggagaccgagaccatcctgactaacacggtgaaaccccatctctactaaaaatacaaaaaattagccgggtgtggtggcgggcgcctgtagtcccagctactcaggaggctgaggcaggagaatgctgtgaacctgggaggcggagcttgcagtgagccgagattgcaccactgcactccagcctgggtgacagagcgagactccatctcaaaaaataaaaaataaaaataaaaattagtgtcaaggattttaatttttttactcatattggtccattgtgatggactgcactgaattgtattctttgcttcaagttatagagagcctgtaaatgacctgcgtacttagtggctccagaagctgtcattgatgtcttgtctttcaacagtatctccttataacatacatcagcctttcttaccacctgtttcttggaggttgtctttgctcatcattggaatgctggcagattttactccagggtagattcttggccctcctgccctgttctttggtaaaaatcatggcaaagccttgcaagtgtgtaggaataggaagaacacctggaatttctagcatttctcttcttttttttttttgagacggaatctcgctctgtagcccaggctggagtgcagtggcgcgatcttggttcactgcaagctccacctcccgggttcacgccattctcctgcctcagcctcccgagtagctgggactacaggcgcccaccaccgcgcccggctaatttttttttttgtatttttagtagagatggggtttcaccatggtctcgatctcctgacctcgtgatccgcccgcctcggcctcccaaagtgctgggattacaggcgtgagccagtgcgcccggccgcatttctcttcttgaagggtaacttttagatttctgaatctttaggaacttacaggaatggtaggtaagaaaataatcctaaacagggctgctgtggtagtttaaaacttcagaaagccaaattctacatgtttcagaggaaagtggagaaaaatgttatgttaactggagggaaaatcaacttcctgaggaagtggagtctagcaacctctttcggtttcacagagtagttcaataaataggaagcacttgccagcacacaaaccttttacagtcaagttgctcgttgaatggatggaattgacattccctgccctttgcctagaataggtggttacccacatttgcttggcagtgcttaagcccatcttcccaggttcatctttctcttactgttaggaacctgactggaaccctgaatcaggtttgacttttatccccctccaatcctcttattctcttgctttctgttcactttctttcttgattttttgagatggggtctcactctgttgcccaggctggaatagtgctatctcggctcatggcaacctctgcctcccaggttcaagcaattcttctgcctcagcctccccagtagctaggattacaggcgtgtgccaccatgccgagctaatttttgtatttatagtggagatggggtttcaccatattggccaggctggtctcgaactcctgaccttaactcatccacccgcctcggcctcccaaaatgctgggattacaggcatgagtgagccactgtgcccggccatctgttcactttcttaatgtctagacatattttatatcaaggtaaaataacactctaatatttaataaaataagtaatgggcttacacttgttttttctttctttttttttttttttccatacagtatctcgctctgttgcccaggctggagtgcagtggtgcaatcttggctctctgcagcctccacctcctggcctcaagcaatcctcccacctcagcctcctgagtagctaggactagagcgagccaccatagccagctactttctgtattttttgtggagacagggttttgccatgctgcccaggctggtctcaaactcctgagcgcaagtgatcacccgcctcagcctcccaaagtgctgggattactggcatgagccacctcacccggctaggggcttacattttatttcttcttattttctcttttttttttttttaacccagggtttttaagaaccctgttaacccctgcttatgttgtgttgatagtgccaagggtaatctgttttaaacctttgtctgcccttcaggctccggatttctatgtgcagatgaaatgggaattcaccagctggggtgagtggctgtgggctcgttatttatttctctttctaaatttacttagcccgcatgtaggtttatttttcctttgtaaaagttacatgtatttttttttagtcaaggaaatacatagtgaagaataaggaaaaataatcactgatagtcccagttaaacacaactgttaatgctttgggtgtttttcatccggtcttccccgccatgcataggacttttcctcccaggcattcatgaaggtagtatatagacaatttcatttcctccttttgtcatttatagccgacatctatattattagttttaaaatgtcactttatttttattttttattttatttttatttttatttttttgagacagagtctcactctgttgtccaggctggagtgcagtggcatgaccttggctcactgtaatcctcatctcccagattcaagcgattctcatgcctcagcttcctgagtagctgggattacaggtgcgcgccactgtgcccagctaatctttgtatttttagtagagagtggggtttcaccatgttagccaggctggtctcaaactcctgacctcaggtgatccacccaccctagccccccaaagtgctgggattacaggcatgagctaccatgcccagcctaatttttgtatttttagtagagatggggtttcattatgttggccaggctggtctcgaactcctgtcctcagctgatccaactgccccagccccccaaattgctgggattacaggcatgagccactgcacccagcccaaaatgtcactttaaattgctagaattttaataagtagatttaccataatttactaatttccttatgtggtttagcttgattcttttaaacttgttattctaaacaagatgaggtgaatattggaatagcttatttttttttaacaaaatggatatatttctctaaagtattacgtaggcagttgactgacagtatatttccatagatgttctactttcatttcttgtagataaattaacgataactcctaacttacagggtttcagctgtttccatttccagacttccctttcaggcaagaagtcatatttgtatgaaatgtttaaatgacataaaagtacgtaaaagaatagaacttcagattgttttgagaaatgaaatttttttctaatgcacatagtcactcttatttcaggttttgttaaaaagtggcatacttaggccggatgcggtggctcatgcctgtaatcccagcacttttggaggctgaggtgggaagatcacctaggtcaggagttgaagaccagcctggccaacatggtgaaaccccgtctctacaaaaatacaaaaattagccgggcatgatggtgggtgcctgtaatcccagctactcgggaagctaaggcaggagaatcgcttgaacctgggaggcggaggttgcagtgagccaagattgcgccactgcactccagcctgggcgacagggtgagactccgtctcaaaaaaaaaaaaaagtggcatactttagacatttgatactctgaatggtggatatgacaatatggtaggccacagccatatggcaagagttgcatatgtgagtgaggaaggccagatgtacagaccttatatagtggggacagaccccactataaattggggctcatttcaggatcaagaatactcttgggaaatttatttagactttttttctggtgaatggaatggaaggttcatttttatttttcaagagtgatttcctgtatggtaaatatgaaagccaagaagtccgttgtttgatggtcaccatcttgccactcccctccttttattaaatcagaatcctgatttcctggcctaggtattcttcttggcccttgagtttttctcagtagtacacttctctcctccagtgcccttggtttctagaatatgcccaaatgatgtctgtcgcatctggaaaagtggtgccaaactgcgcgtcgatatcacattgctgggatttgaaaacatgagctggataagagggaggcgtagttttatatttaagggagaaggtgagtgacttctcttgtagtaatcactgctcaagcaaaattacagggtgatttttaaccaagaaaatgctttcacattcatgtgacttttctgtctgatccttcctagggcatgtttttttggttattcttattaattattcagctctccatccctgtcttcgttcttgtctggctagctctccttcatgtgtcctttaccacccagcagttacccttgtgatgtgtctgcttcactttcctgagcctttgagcacaggccttctgtgtgtatctctgtataaccctccataatcaggcatgagaaatggcattgctcacccaatgttgtgcatacataatttctgtgaattctgtaataatatattttataaaggacattgatggaatatattgctaataagaatgcagattattaagaaaaattccgcacctttggggaagatggctcagagcttcctatgtgttgtggaaagctggtcagataatccctgtgcaaataggtagtcgataatcagtacactgtaggttttaccagatagcacctgggaggacacacatgaaagatgatacattttaacatacgaagcttccttgtttttgcatcttccctactttgcacttagttatgcctttgtttccattaatagacaactgggcggagttaatggaagtcaaccatgatgacaaagtggtcaccaccgaacgcttcgacctttcccaagaaatggagcgcctcactctggacttgatgaagccaaaaagcagggaagttgagcggcggctcacaagccctgtcattaacaccagcctcgatactaaaaatattgcttttgaaaggtacaaatttagactctaaattttaatgtctaatccccatgctgccatcttgagtgacatgtatgtattaattgtaaattatggatggattgggctttttctaatatgacataataaacactagtgggttttaagattgatctctaaccagtagaaattgtagctgacactcgacaccatccatcatttttacagttaagtcttagaagacttaaccaacatgaagagtatgaagaaatgtcttccttttcttttatgtcttttatgtgccctttctagtggattttacttgaatcctatttttgtcttagtgtttatggatccacaatactcagtcccagaccacagagcgtggagtttctggaggttagaattgacccagtactgagttcagttgtactgatattggtcagtcagattcacacttactatatagttaaatgtttgtttgtttgtttgtttgtttgtttaacccacctgtgaggtttaatagtttagagcaagaatctggaggggattcagttctgttccagactcataaagaattctccagagaggtctgtgccttggttaatccagatgaggacaccatcactggtcatgtgcctctgggccacatggagggcatgggggggcctttgagtagaggctgtcaaagctgttcgcttgtttctacagtggagaccactgatccgagggagtcctaagagcactgatagtatttgcctaggatgtcacatccagctttctgcaagccaaagtagcttagcctgagaaaatggacactatcatcctgatagtatttgcctaggatgtcacatccagctctctgcaagtcaaagtagcttagcctgagaaaatggacgctattatccttatagtatttgtctagaatgccacatccagctctctgcaagcctaagtagcttaccctgagaaaatggacactattatcctggacttaggccttcttttctcttgatgaatataacaactgtcctctcattatatttttcttttctttctagtataaaattggttaataaatgtgtttagtcaagcataaaacttgttaagtatccttttcttctaatttagattgagctgtggaattaggacatctgtttgtaatagaagaagaaaccagtgtgtccagggctgctgctagggcaggagggtggcatccctggaggcagggtcagtcctcttctgccagcctccttgcactggcctggccagttgacattcatggtctttcagggacagcaaaatttagggactgactggctttccctgggagggccttggaaagacatttccaggcttccgcatacccttctgcagacagggaggccccttcagcttagggctctgttcataaccccagaaggcagaggaagctgccttttctgccactgttcatccgtagggatgagatggggaggaactgagtgccatcagcagggctcctaaataactgcgactttgggcaagtggcctcatctctccagttttctgtttccttagctgaaagaaataattgagtgaatctggagatgaaatctccaaagtctgtgactcttaagatgtcttgagaagagacattgttccccatattgttcaacagtagagttgccagagtcattgtttgttgaagtgcgatttgtgaagagagggtgacaattcctggctgttaccccactgagtataaatgggaaatgatagcatattccatttgtaccgaggactaaggcacattttgtatttttgtgcccacagggttttcagagttctcaagctaactcttttgcaactgacagtgtgtagctgagagagaatttttggaagacagctgctttgttttaatggtgctcagaattaaatgtgtgcttgtcgtgcattgagcaagaattgagccactccttaggattgataccagctacgaaaagaatatagctgctcttgaatgtgaggtttgttggtataaaaagtgtgtgaatttacttctgatcagaggtgtgagtattcatttgattgaatttggaaggtgtggccttctctcattttcttttctttctttcttttcttttttctttcttttttttttttttttttgagatggagtctcgctctgtcgcccaggctggagtgcaatggcacgatcttggctcactgcaacctccgcctaccgggttcaagcaattctcccactttagcctcccgaggagctgggattataggcaccctccatcatgcccagctaatttttgtatttttgtagaggcggggtttcaccacgttggccaggctggtcttgaattcctggcctcaggtgatctgcctactttggcctcccaaagttctgggattacaggcatgagccacggcacccagccccctctctcattttttgatggtcacttttccacttttttctaatccgttactcagagcttatgtgtgcaaattaataccctgccctgatgaatttttggcctgcagtatatacactgtggttgcagtttgaatttttcccttttctgaaagattatgctttgcccacctcaaacaaaatattccctgccaccttcatagcctttctcctgattgtgtagcaaccaccaagacacagtgcctgtgaagtggcctttggtgtggtctcagtggagacaggcagaggtgaaaatggcacgagagggaagccaggtgttctatcatcttcggatgcttttgcatgcaaagttaccaagggccacagagttattaggaaattaaaatttaaaacagggtatgaacattgggttgaataactaaactgcttccaagagtggaaatgctgagctgggcgtgctggctcacgcctgtaattccagcactttgggaggctgaggcgggtggatcacgaggtcgggagatcgagaccatcctggctaacacggtgaaaccccatatctactaaaaatataaaaaattagccagacgtggtggcgggcgcctgtagtcccagctacttggaaggctgaggcaggagaatggcgtgaacccaggaggcggagctttcggtgagctgagattgcaccactgcactccagcctgggtgacagtgtaagagtccatctcaaaaaaaaaaaaaaaaagagtgcaaatgcttagggcagtagaggcaggattgccgaaggagcagaggtagcccggtgaggagcttggtggttccttgggagaaaagcatagcgccgtcttcccagcgtgcatgaagggtgaggtggagcagacgtaatcatctttccatccatcagaagagtctgtgccagaaaacagtgacttcctgtggcaagacatcaagtgacttaagcaaacaaggaactgaggattgaaggaaaaaggctatctcgattttctggtattaatgataaaaggggattgtagcttattaatcagttgagtctggttccttaccttctgcccctgtgactgttatcttgtttctgaagtgtcagttggagatagcatttggtataatacttttaggattcctctgtttccatccacgggttgtgctgtcctaattgtagacaactagtaggaaaatgggagctctgatccctcctgttctgatgggctaaaatagacacataaactcattataccatctggactaatttcattgaccaaatcccattagaagaaaagcaaactatttggaaacaaaatgctaataaccgcatatgttctttgtaacgtggctaacctgctgctgttccctgagcttcctgcatgacatcccaaccactcagtggtcagagcagaagtcaggctgttgccgtagccagggccaagaggagctgggatgtgatgtcctagacaaagggtagggctggtcagggatcccctgtgagagggagcgtttcccagggcaagctgctttgaaaaagaatcagagcctcctggctgcttttggttcctaaatacattttttttcaggagtatgttgagttgaataactgagattttgggcatattaccaatgctgcatctgccactggaatgctgggctactttaaaaggagttccacagagatggaattaacagctgggctaaaaaaatctgtttttcacatcctttgccctgctgcaccaaacctgcccaaacatgtgactcagctattttgcagacctaatggcatctccaagcagctcaccacagtgatgagttcctggcccacctgctcttttgtaaggagcaggatggtctgtgcctcattgttctaagaattcctcgagtgagatgtggctacttgtggagatcccaccattgacatgcatgtccccagttaagatgacccagataaatgctctgacctggttaccaccttgtggcaagcccttggatgctggtcatcttcagtcacttctttgggactgctgtccaataaatgtcaccacctttgtcctcaatgctggcagttttgtaaagaagccaagattggaggctttctatgcctggggtgaggcaaattgattaataactgtgggaggagggtggagggtgcataagccatctgtcattgctaaccgcctcctgtggacaataggaccatgatttccaagtgtccttcactaacttaagctgggggggaaaaaaactataaaggctacagatataaatctgaatggcatattgtacatgtagaaatttgtggtgttcactttttatcagaactaaatccggattctggggctggaggacagataaagcagaagttgttaatggttacgaagcaaaggtaaaaggaaactcttaaaataagatttaatatagctatttagcttctatgcaaatgaggaatctgttcccatttttttcatgcatctgtgccatggagatgctctggggaatgagaactgtctaatgtgtctctcacttggatgtttgattttgtcttatttgactttcagaaaatgggatagcatgccctgaggaggtctgtagctatgctaaagagaaacaatatggtagagaaatgagtacaggtaccagttgttctggtaggaatgacaagctagtcattcccttaattatttaaaaaaaaaaaaggaagaggaaggattagacttcacatgtgttcaaatgttgtgtagtagcttttgagtctcttttttgttaaatcagcttaattgtaatcagcaggcgcacagcccatttgcatgacatcagtgcatttaaaacatagttgtaatagtggagacgattgttgatccagtcatctggcattttgtcagctggaaagctgtttcctggcctttcagtccctcagtacaacagggattgatggcttttggtgttggagcccagtgctgcagggtcctctggtggcctctgagtgagcaaagaaaggcttacgtcatgctcagcaagatacatttagaagcacttgtcatagtgctgagtgtgttttctgcagctttgaatgttggggctcctcacgtggcatatagagagaattctttgttaactgttatgtttgattttctagaccaccatattccccagttatccttgataacagagcatttgctctggcagttacaataatttttgtcagtgcacagaatgccttttaaatagtgacttgctggttttctctacagctcataagtctatagagaaccttgtgttcatacctttctcttctgcccagcagatggctgtctgagtcatactagtattacaagactaccagcggaggctgggtgcagtggctcacgcctgtaatcccagcactttgggaggcccaagtaggcagatcacttgaggccaggattttgagaccagcctggccaacatggtgaaaccccgtctctactaaaaatacgaaaattaaccagtcatagtagcacatgcctgtaatcccagctactctggaggctgaggcacgagaatcgcttgaacccaggaggcggaggctgcagtgagcagagatcacgccactgcactccagcctgggcaacagagggagactctgtctcaaaaaaaaaaaaaaaaaaaattaccaacagaagtacaggatcctggtttgggtaccttagtttaatagaaacccaggtggaaacctagattgcagggcatttgtttgagactatttagccacagcagggcaagcaggaagatgcagcctgtcactgctaactccttagtattaaaactgtcaaacatgggaggtaactgctgatgcatttttcagttgatagtttatatactttctctgaaggatcctaatgatagttaaccatttctcatttttattttgctggattgttttctgttttttgcttcagcattcttgcttttgctgtgcttacttttggagttttgattccctgtgtcactgttttctttcgcatacacctctcaggtttacacagtaaacaatgtgaatgtgatcaccaaaatacgcacagaacatctgaccgaggaggaaaaaaagagatataaaggtaatcaccaccaccctcccacctcctgttttgttgttattttttaagcctagagggaactctttgttggctctgttaagtttagggttaatgtgattgggttgtgttaagcctaaccctaacttcttctctctctctctctttttttttttttttgaggcaaagtctcgccctgtcacccaggctggagtgcagtggcacgaccttggctcactgcaacctctgcctcctgggttcaagtgattctcctgcctcagcctcctgagtagctgggattacaagcacccaccaccacgcccggctaattttttgtattttcagtagagacggggtttcaccatgttggccaggctggtctcgaactcctgacatcaggtgatcctcacccacctcggcctccgaaagtgctgagattacaggcgtgagccaccgtgcctggcccctaacttcttttttataaaaatttctggccaggcacggtggctcatgcttgtaatcccaacactttgggaggccaatgtgggcgagtcacctgaggtcgggaattcaagaccagcctgaccaacatggagaaaccccatctgtgctaaaaaaaaatacaaaattagctgggtgtggtggcccatggctgtaatcccagctactcaggaggctgaggcaggagaatcacttgaacctggcaggcggaggttttggtgagctgagatcgtgccattgcactccagcctggacaacaagagtgaaactccatctcaaaaaaaaaaaaaaaatttcctggctgagcacggtggctcacacctgtaatcccaacactttgggaggccaaggtgggcagatcacttgaggccaggagtttgagaccagcctggccaatatggtgaaaccctatctttactaaaaatacaaaaattaaccaggcgtggtggcgcactcctgtagtctcagctactggggaggctgaggcaggagaatcgcttgaaccccagaggtggaggttgctgtgagccaagattgtcccactgcactccagcctgggtgacagagctagactctgtctcaaaaaaaagaaaaaggaaagaaaatttccttagtctgactcattcttggaggtgtttccccatagttggcctcagctgtaattaaagctattcgtgagggcttgtttatgtgttatcaagaacaattgttgaattcagccaaaaaaggagataaggacatttgagaatatttatcattggaatgagtgatttagtccaaactattgtgatgaaagatttagacagaacttggggtccaagcaaaaacattgcatgtggttgccacatcccagccccatcccagccccaccagttctatggccttgtgaaattacttctgctctgtgccttagttcctcagcagtgaaatgcaggtgatacccaaccttccttagagttattgagaggattagatgagttacgacgtggaagcctttagaatggcgcctgcagtatgtggtaagcatgcagtaattgttcaccagcaccaccaccaccattgccattactccactttgacagatgagggaactgaggcccagaacacatgggtagcgagtggccaaggtggggttggaatccaggtctggctcactccaaaatccagactcttcccattattctgctttaattcttacaactgtttatctagtttagagatcctcatgaaaagcaccctataaaggataaattagtttatggttattgtgaatgatttgatcagccagtctgtaattgcatttcctaatgaggtagcttggaccagaaactttaatgaagatcttttttttatagccacaagtgagatataatattagactttaaactccctacccctctgtagcagacaggaacccgctggaatctttgctgggaactgtggaacaccaatttggtgcacaaggggtaagttgaagcaatgagctttcattgcagttagatgaaaggaaacaacttgtctgtgtctgggatggcatttactggatcctgaacagcccactctatgtaaaggccaaagatacccccaagctggaatttgagatactcttttggaagagaattagatgagtgactctttgaaaataaataaggattttagaggaggggtagtgattatagaaatcaggtgctttccctcttatccattataaacgaggggcctctttatagaaatggaacttaaaaaggattcaggactttatattgcaacagagcaccttaacaaatattttcttacttgatgctcacagtaactatatgaacttggtacagtggatgtccctgcgggtcagaaaaatgaaattacctttccactatcaaagctagacagggaaacagctagaacttcaactccaagtcttccaagtctcatgcactttcagatatttctttctttttttctttgttataatcaggagataaaaatgtaaaggagagtagagaaatattttaaaatgaagaaatccattacacttcctgtgtagtttggtgatatcctcatagattttcttgttccatgcaaaaaagttagtgaatagaacttcccggtctttagctggttaacacgtccacctcagacactgagtgccacaggccttcacttgtgaacatcatttggcatttctgactctcctgagttctggctcagcaggacctcaccacggaatgtgctactgcaaacaaccccacagccatcacgcctgatgagtacttcaatgaagagtttgatctgaaagacagggacattggaaggccgaaagagctgacgattagaacacagaagtaagagaggttcagctgccattttcaacctatgtatgtttcagaaattgtgctgttttatggtgttatgttggatcattccactgccctccccaccacccttatttttttttcagacggagtctcgctctgtcgcctaggctggagtgcagtggcacgaactcggctcactgcaacctctgcctcccaggttcaagcggttctcctgcctcagcctcctgagtagctgggactacaggcgcgtgccaccacgcccagctaatttttgtatttttagtagagatagggtttcaccatattggtcaggctggtctcgaactcctgaccttgtgatccgcccgcctgggcctcccaaactgctgggattacaggcatgagccactgcgcccagcctcctctgcccctttttataaaaaataattttaaaattactttgccatgaaagctaacagtagattgtccatgttattagctcctttccaaatagaatctagattggatgtaagaattcctttttttttttattgctaaccagcttcagctgatcaaattcaaatgaaactgttccacccgctatcatttcttcatgcttgctgtcaattaaggctttgatcgtggcaggttgtcatgcaggtcgcttgcctttattgccagattttagggtgatgtgaattccttgtggccctagacatttgacctttaataggtctgaattaagagatgactgggcagagtgtggagtaaagctgctgttgtctagcctactgcatagcaataatctccttttcccatctggtggagatgacctcagtcttttcttggttgaattctgcaggtttaaagcaatgttgtggatgtgtgaagagtttcccctctctctggtggagcaggtcattcccatcattgacctaatggctcgaacgagtgctcattttgcaagactgagagatttcatcaaattggaattcccacctggatttcctgtcaaaataggtactgctaaataaacttcagcaacacttggaggttctgcccatgtttgtgggtggcagcatgtgggtggcaggatgcttcagggaattggagtgctttaggtcaaagtagcttatagacataacagaggaggtcagagttctcctgtggtttgatttaaagaagtgttatgattagtggttcattttgtgtatcaaagtcaagagatctccaaccatcatttctatttgcaaatggtgctgacagatataaaaaggcataaaaacatgacacagtcattgttttaatgtcaaaccttaattcagtgagacttcaaattagataattatttgaggaagacagttgacaccaagatcctttgatatgtaaatatgatctacgtcccaagctagtatgcataatgctatatatgtatatatcatacatactactcatgaagagtattaattttggatagttgtatgttcatgatacttgaaccctggcttgatcacttactcactgtgatctaggagaaaatacataactcattttctcttttttttttttgagatggagtctcgctctgttgcccaggctggaatgaagtggcatgatcttggctcactgcaacctctgcctcctgggttcaagcgattttcctgcctcagcctcctaagtagctgggattataggcatgcatcaccacgcccagctaatttttgtatttttagtagagatggggttttatcatgttggttaggctggtctcgaactcctgacctcaggtgatcagctcgccttggcctcccaaagtgctgggattacaggtgtaagccaccgcgcctgaccgaaaatacacaactctcaatctcagttttcccgtctgtgtattgggaagggttgttatgaggcttaaataaaattatacttatcaaagtacttggcatagtaagcacttagtaaatgataactattattgttattctcagtaaagtttacttataaaagtttttattttgtttgttagaaattcccttgtttcatgtcttaaatgcacggattacatttggaaatgttaatggctgtagcactgccgaagaatctgtatctcaaaatgtggaagggacccaggctgattcaggtaaaaaaataaataaatacaaagtttagttttgttatttaaaaaaaaatttatggccggacgtggtggcttatgcctgtaatcccagcactttgggaggccgaggtgggtggatcacctgaggtcgggagtttgagaccagcctgaccaacatggagaaaccctgtctctactaataatacaaaaattagccgggtgtggtggcgcatgcctgtaatcccagctactcgagaggctgaggcaggagaatcgcttgaactgggggagaggcggggggatggaggttgctgtgagccgagattgtaccattgcactccagcctgggcaacaagagcaaaactacatctcaaaaaaaaaaaattataattcagtcatcatattcataattcactctgaagctggaatatctgagggagtagatgtctgtgttggatgaaagaaaatttcagatttagtttagattaagcaaaaaaaaacttgtagaatatatatgatcctagttatattaaaaagaaaggatgttcttaaaaatcagctttattgaggtgtaatgtacatacaataaaatgctctcattttaagtgtgatggttcagtgcattttttttttttttctcagagtctcactctgtcacctaggctggcatgcagtggcacaatctctgctcactgcagcctctgcctcccaggctcaagcgattttcttgcctagtctcccaagtagctgggaatacaggtgcgtgccaccatgcctggctgatttttgtatttttattagagactgggtttcaccatgttggctaggctggtctggaactcctgacctcaagtgatccacccagctcggcctcccaaagtgctagtgtgagccaccatacccagccacattttgacaaatgtatgcatctgtgtaaccaccaccatagtcaaggtagacagcatttccatatgcccccaaatttccttacactcctttgccatcaatacaattcatgattttagatgcaattgtaaatggacttattttcttaatttcatttccagttactagtatatagaaatataattgagttttgtattttgaccttgaatcgtttttaaaaattttttatcttttttttttcttacacaattgcatggccaggattgaccttgtttatcttgtaacatggctgaatttacttgtcttacacttttttgtagatttcttagaatttcttacatatatggtcatgttgtctattaataaagaaaattttactttttcctttctaatctttaagcttttcatttctttttcttgacttactggactggctaggacatctagtacaatgttgagtaagagtggtaggaatggctgtccttgtcttgttcctggttctaggggaggaaggattgttgtgccattaggtatgatgttagctgtgtaggttttttataaatgtcccttattagttggaggacattattctcttatatttctagtttgctgagagttattaccatttttaagtattgatttttgtgagatgtgttttctgcaactatcatgatggtcctatgtttctcccctgtagtctaccagtaggaggaattaaaagatagcattttaatgtatataaattaagacttcaaataaaaacaattgaactcgacaataatatacacctttacattcccatgtagcaacaaagttgggtgagatgtgttcatgaggttgtgcagctaaggaacactcgtgcactcttggctggaagaggagattggtatagttccttgaataaaacattcggcattactgtataaactgaagatgtggatgacctagcaattcctagatgtgtaccctaaagaaagttatgcacatgagcatctggagaccccagtactgggcagcagcatccattcataacagcagaaacctggaaacgacccaaatgtcccgagatggtagaatgcgctattgtgctctattaatacaacagaataacatatagtattgaaaataaaaatttatagctatgtgcgtcaaaactgttgaatttcaaaagcataatgttgaatgaagaaaatccaatttgaagaataaattccgcatgattccatttatgtcgagttcacaaacaggctaatacaaactattaggatgatatacatgtggcaagctccagagaagagctaggcagtgtaaacaactattctgaattatgtatttacctctggagaggaagaagggaatattgttaacaagggatgtgcccgcagtatggtattgatagtgtttttttctttttcttttttttttttttttttgagacagtcttactctgtcacccaggctggagtgcagtggtgcgatcttggctcactgcaagctccgcctcccgggttcatgccattctcctgcctcagcctcccgagtagctgggactacaggtgcccgccaccacgcccggctaatttttttttttttttgtatttttagtagagacggggtttcaccatgttagccaagatggtctcgatctcctgaccttgtgatctgcctgcctcagcctcccaaagtgctgggactacaggcgtgagccaccgcgcccggcagttattgatagtgttctgtgtcttaggctaggtgaagggcacacaggcatttgtttaattattatcatttttaagtgttcagatattttatatatacttttatatatttaccatatatcttcctgcaaaaggaagaaacacattggtgtgactgtgcgtatatgtttagggggagaaatctgcgcttttcattttatagtcttgtgtatttttttatgactgtgttcgttgtttccactaaaatcaaggaaaaagaaaaaagctgtattctgtcacttttttctgtcatgcttcctcagaatctctcatataatagtaagccttgattgttataattttgagcctttcttttttttctaatgtacaacatttttgcaaaaagttggagtggaaatgtaatgaactcagacactggacggttgccttttgtttcagcttcccacatcacaaactttgaggttgatcaatctgtgtttgaaattcccgaatcttactatgttcaagacaatggcagaaatgtgcatttgcaagatgaagattacgagataatgcagtttgccatccagcaaagtctgctggagtccagcaggagccaggtgtgtttatcagaatactctaatggcagggcgtgggaggtcttaccctctgggttagcctcagtgtttggctaatctgaaagatttattctaaatatcaagtttgacacattcatggtatttgcataggttatactttgtgcatctggtcttcttacaaaagcttgttatgtaagagaccatctacataatcccagtcagcaccattcacaagatgtcttcaggcagactttccttttcctcatattcacgcacatagcttgtaattctgtactttttgagatgtgcttcatcattttctagcactgaagcagtatcatatttttcctgaaggattacctgtgtgtcagtagtctcggatgaaggtagtgaagtggatttgaatcccacttcctccacaaagggtaccatctccctaaactctctctgggtctctagtgaaacagaaaatgaaggacaggacagacctgtgtaagcagtaggctttgtgtgtgtgtgtgtgactctatgttgcccaagtcggagtgcagtggctgttccccggcatgatcatattgcaccctcaaactcctgggttcaagagatcctcccacctcagcctcccaagtagctgggactaaagtcatgcaccactgtgcccagtagaacagttgccttttattgtcatatctggttctccctccatgcctcacctacctgggacagtccaaggcttgaggtcctcctcccctaacatcaactccttccatctccttccttctgtgcctcctggctctactagggtagggtctggtctgcctccagcaccctctggtgtgtcctgggttcctgcagtccatttatttgttaattggctttttcttccattcttcattcagatatttgcagagtaccttctttgtgccaggctctgtgccaggtgctgggaattctctgggaagcagcccctgccctcacagggctgctgctttgagaacagtgctcacactccagcgtcctcactggttcaagcttatagctttctggttctattcctgagtcttagtgcttgtgtaatgtgagtctacctcctccacttccccctgccaccaccatggccccattcccagacccattcagttttccgagccagaccccaaagcaagcatgttccctttgggaggcatcctgggagaagacccctgcacatcaccatcagcctggtatgcttttcctttccctatgtaagtgagcttagctccccccgccagctcccaagtagcttcataaaccttgttgaccataagttttaacaagggaagtagccaaagtcaaagactaccagtattgaattgtgtcttctaatcttgccctagaagaattactggctgggtgcagtggctcatgcctataatcccagcactttgggaagccaagatgggaggactgattgagcccaggagtctgagaccagcctgggcaacatagtgagatcctatatctaccaaatttttttttttttttaatttttgaggcagagtctcactcttttgctcaggctgcagtgcaggggcacaatattggctcactgcagcctctgcctcccaggttcaagtgattctcatgcctcaccctcccgagtagctgggattacaggtgcgcaccaccagacccagctagtttttgtgtttttagtagagacggggttttaccatgttgtccaggctgatcccaaactccagacctcaagtgatccaccagccttgccctcccaaagtgctgggattagaggtgtgagccaccatgcctagcctctaccaaaaaattttaaaagccaagtatggtggtgtgcacctgtattcccaactagtcaggaggcttaggtgggaggatttcttgtgccctggggtcaaggctgcagtgagctacgatcacatcactacccttgagcctggacaacagagtgcgaccctgtctctaaaaaaacaaaaacctgctttggtcacttgaactttgcccaaggtcagctgtgtttttgcttttcgttgtgtatatcttccacgtgggttagctgtatttaagagactgattttgtacaaaggatgagaaggttgtggctgtgagttaggctgtggcatgttactacctcccacttaggtgttgtttttgaggtaacccaagtccctgttagcttttcacacagcactattgataatggtcatggaaagacttttaatttggttcttgctgccatcgtttccttaccagaatggcaccaatttctcctaagacgtattcatgtctatcacatttgtctttgccaggaactttcaggaccagcttcgaatggagggatcagccagacaaacacctatgacgcccagtatgagaggtgattgactgacgtgactctggaataaaccagggtgaacacaggcctggacacaggcgagcagacgcgtggcactgtgcatttggtcctcaggcagatgtacggtgccacaaactggcaggaaagactagaaaaagtaggccaggagcggtggctcacgcctataatcccagcattttgggaggccgaggcaggcggatcacgaggtcagaagattgagaccatcctggctaacacggtgaaaccctgtctctcctaaaaaaaatacaaaaaattagccgggcatggtgccaggcacctgtagtctcagctactcgggaggctgaggcaggagaatggcaaacccaggaggcggagcttgcagtgagccgagatcgcgccactgcactccagcctgggcgatagagcgagactccgtctcaaaaaaaaaaaagactaaagtgttggctctcttgcttcctcttgtggcagttacttataataactctagactcttgatagcaagtttccaggaatgggtgatagaattgctgactggttcacaggtcagtgccattgggggaaacgtactgagtcagttttttctgattggtttgatcttctatgaatgatgtatgatcacagggcctagatgtcctcagtgggaagtttatataattgtaaagataaggaagtttggaggaacagctccagagattacgggaaaaaccgcgaggattcattttacgaagacttatacttaaggtgtctatgagagcctgttgatgaagaacctgagttttgctttaaaacagatccaagttcaattcccagccctatcacttactggttgggtggtcttgggcaagattgtggggtttctcacccgtatacaacacctacaccgccagttatgtgggattaattggcatcatgcatattaaatgcctggcacagtgtgcccttggtaagcggttaagaaatgtagttactgctgccaccatgatgatgatagtagtgactctccctttttatctgttttccaacccagggccatccaggagagcctcctcaccagcacagaaggcctgtgccccagcgccctgagcgagacaagccgttttgataatgacttgcagctagccatggagctctctgccaaagagctggaggaatgggagctccggctccaggaggaagaggctgagctccagcaagtcttacagctgtcactcactgacaaatagacctttcagcctgtgagcctctgcacaaagcagaggctgtgggctgtcacagatgctgtgtcaaccagggccctagggctaagggcctgcaccttgcgtgcatgcagcaggcaacaactgccccttctttatgcagaggtgcagaaccagggactcctgggcccatccaggctgctccctggggtggagaagggaccagggattgcaggccccatctccaggctaaggggaggagagcatcatcactttccattagctgtattggcttgcaggtcacatttttactaccagctttagacaaaaccccaatccccgcaggtttgtagataaatttttatcaaggagtgataacaagacaagttattgcagagtcagggtgcttttatatataagagcagcagccgcctttgtaaagtgtgatctatgagaattggagacacttctttactgttcaccaaagaaatgggtaatctgtgctgatctccttatttttacctttttacagggtttctaggacattgtcattattcttcctccatctatctgattccattccttccacacccagctaaagttagaggagatacatatagaatctattttagattattgttaactatttgcatcaaattaagatacacaaatggccatggatgttgccttagccttaaacattactaatagtttcacatcacctcactgcacgcatcgaaggatctgatttgaatttgtaaaggcaattcttttgagagcaggattctccaggctaaatcaaaggcagctaatcctgtccctgaaggagcagctaggggaacctgaggcttgttcttgaagtgggcaagctggccaaaatattggaacacacagaaccaaaccaggtgtgttctacacctgcatgagtgaaggatttccacgtagacacctaggaagagcccgcatgccctagactcactccagaggaaggattgatttgcaaccagaaagggagctgaaaaccacggagctccatggctcttcattcaaaagggaaaataatgattccacgttgctttttagagttcaaatcaacatctttctggataaatctattttttaacaatctttttattatttgtaaaagatataaaaacaactcccatcagtagcaatacaaggttatacattttaaccagattttctcaggccttttttggatacctttagtagttaactctcttttgtcaaaccctcttgtatataaccatcgcacaacatacagaaccctggggaatacagccaagggcactgctcactgtggcccgtgtattcattcccacaggctgcactgaaataacctggtaaacaacaccctcctccattttgcgtctatttcttctattgtgcttctttggggataggaagagaaacataactactgttccaggtaacgtctgtatcatacagttagtgttgccagtgaaacgttcccagatacaaagaattgtgcttttaattccatttcacaatctgttttgttttttttttttgtcattgtctgaccaaaattccttctgcacatgaggccagtataggcaacgtcacatttgtttgtttcaaatatgcagtgtggtattttgtttactttgcatttaccgtgagcaaagatacttcttggaatggctgcagtgaggccgtgtcattggctcacaaaagtgactcataggtaatttctgtgtttgcattccactgctctgctccctaaggtccttgactttctccccaggaattcacttaaaaagggactgagcattgtgtcaacctgttgcagtgtttttcatatatgtgttcactctaaaaatgcaaataaagactgcttccttagagggtgctcatacaaaattccagtctttgagtctttttccttttcagttttttctagtcactggatgtacccacacttcctgttacgtatgtcagtagaacattagaatgcctcacttcgctcagttcatcactgcaaaggtggcatgctcctcccagccttcctgcccaggttaacaagccccatgctgcttgtttcaaatggcaactaaaagcaagccagtgttgggctgttctgacacctctgtggtcctcctggaggggaactggctcttgtggggtaagggaagcccagccaacatcaaagctctgcatcaatgctatcccttgaagccaactgctttgtgaggctgttcctagaagtccagatgataaggcttccaaactcttcctatatctaaataagcgggtattaaaaacaacaaaggcagtggccagtagaaatgtatgggttccagaaatgaggctgtatttctgggaagatgtaaaggagctgctttgcttttaggggaaagtagatatcaatactttgaagccacaaggacactatgaagaaaaccattactctttcaggtcaagaggtgcaatgactatggattatttaaaaactgaaaagctaagcttgagtggcccaatatcagcaggaagtggttttttttttttgtttgtttgttttcctgagacggagttttgctcttgttgcccaggctggagtgcaatggcgcgatcttggctcactgcaacctctgcctcccgggttcaaacgattctcctgcctcagcctcccgagtagctgggattacaggcgtgtgccaccatgcctggcttatttttgtatttttagtagagacggggtttcaccatgttggccaggctggtctcgaactcctgacctcaggtgatccacccgcctcggcctcccaaagtgctgagactacaggcatgagccaccgcactcggccagaaactttaattgagcaacttctgcacgttagacactgctaggaactaagttcctaaggcactctgctctataaacaagcttgtcacactacataaacgtggcatgtcaagggattgaaagtctgctctaaataatgacaggaaagggaaactgccataactgccagcttggtcgcagtctcctgctgaccacaaatgacatcaaggaagatgaactggatgtggagatttcaagtgattcagtggtacagtgagtgatgaagttcaaagtaccacctaggcctctgtttagaaatatgtgtaggtttaagcctgaggtccaggtggaaaaaaatacaacatgctgatatgactccacagtcactaaatcataggcagcactaggagacttttatctcaactttaggccaggcgcagtggctcacgcctgtaatcccagcactttgggaggccaaggcaggtggatcacctgaggtcaggagtttgagaccagcctggccaacatggtgaaaccccatctctactaaaaatacaaaaaaattagccaggcatggtggctcatgcctgtaatcctggctactctggaggctgaggcaggagaatcgcttgaacccgggaggtggaggttgcagtgagccaacaatgcaccattgcactctagcctgggcaacaggaaccaaactccgtctcaaaaaaagaaatttcacttcacagagcttctttaagtgattagatcaaattcagacacacacctgcatttcaaacacttgggaaataactggtggagtaaaacaatatataggattttactttagttttaattgacgttttgctcaaaagcaaagaactgaacatttcaatggttcaatgttacaagattacaaacaaaatccttacacagttacagtatcctacttcggttacttcacattaaatgcaggttgttaaaatcagtgctgtgcttgaacacaagataagcatttcaatttaataacaaaattaaatctagcaccttgaaataaatattgacgacagctttataagtatgaaagtatcatttcaataggaggaaaaaatccagttcaccaacagtggaaactaatagcagcattttcaaagctgagatgaaatttgtgtaaacacacactggcccgcacagtggacatgcacttctgttggctgggccctccccacccagggatgaacagagtgcccactgagccttttacattccaaatctggaaagctgcctcaagtttcagaccgtgggctagaaagactcaaatgcagggcaagggagatcaatgtgtttaagcaggatggggtcctttttgtaacaggccaacctagtaacatttccagtccaacttcagagcattccaggccaaaggtgcatatagtaacaggtctacctgatgtgaccctgacttcagggggagcacctgagtgcagggcaggatgcaggtgaggaacgagggcccaagatccccacagctgacaccactttgcaaccagcgcattctaggctaactcaggtgagattaaaaaaaaaaatctgtgattcttaacccactgtaaccaaatggttcttaaatagggaatgtctgcatggtaagtctccttcttaataacattttcaagcattaatgatgagttctttacagtgtggttcttacaggcactcacaaggttaccatgttttctttctcatgaacactccatctttacactgacctttggagctttcaggtcttacttttaacaagtacagtcagaaacactgagaagcggactcaggggccaattatttgcgctacagtgttaggaaaaaataatgtctagtacatgttttcttctaattcatttagcatttaccaactgtccagaccaaaggtcatttccaagtaggaaagttttggttccaacttctccactggcctgtgtgcaacacaacttatcctattcccaaatactcattgaagaacttgtctggctgtcaccgacgccgaatgggcttgtagacacaaaatgccataaggatgacagtcaccagcaggatgctgaaaatggttcccatcaacactgcaaagggaaaacaggttacttcctaatggcagctccaggttaggcaattcatccactcactgccaatgatttatcaaatgccacttgctgccaggcactatgtcaagtgctgtgcaaacagctgtaaacagatcctctctccagttgtctctaaatatagttgggggagaaacaaacagatgagagcatttcacatagcttgatataccgtgaaaaaaaaaaacagtaacatgctagggatggagacagggtgggcagcaagaaggggggacagtcaggaagcatccgaggaggagactcacaaactaagacaggccgagtgtggtggctcgtgtctgtaatctcagcactttgggaggcctaggtgggtggatcacttgaggtcaggagttcgagactagcctggccaacatggtgaaaccccgtctctactaaaaatacaaaaattggccaggtgtggtggcatccgccagctactcaggaggctactcctgagctactcagctactcaggaggctgaggcaggagaatcgcttgaacccgagaggcggaggttacagtgagccgagattgcgccactaagcgacagaatgaaactccacctcaaaaaaaaaaacaacaacaaaaaactgagaccttacgagtgaggctctgcagggagcatgctgcaggcccacagatcagctaaggaagggccttgaggccagtataagcccaatacactcagtgaacagaagggaggcaaccaggcaaggagtgcaggaagagaggcaggaaatcaggccagaaaggaaggctggggctggtctgtgcaaggccttggagaccatgaagaaaacacggattttaagtttaaagagaagccactagggggctgtaggcaaaggaatgacatcatctgatttagtcggaaaaaaaaaaaaagattcctctggcttttgtgtggagaattgtttgactataggggagcaagagagcaggatgcccaactatgcctttaaagccattaataaaaacctggagattcaataaagtatttcagtctcaagatgagtcttgacagggccttttgagcaaagaagcaactaactcacaaatctgctatgtttggctgggtgcggtggctcatgcctgtaatcccagcactttgggaggccgaggcaggcggatcacgaggtcaggagttcgagaccagcctggccaatatagtgaaaccatgtctctactaaaaatacaaaaaaaattagccaggtgtggtggtgtgtgcctgtagtcccaactactcaggaggctgaggcaggagaattgcttgaacccaggaggcagaggttgcagtgagccaagcttataccactgcactccagcctgggcaatagagggagactctgtctcaaaaaaaaacaaaaacaaacaaaaaaaaaaatgttacgtttttaagactaaatttcacatctgaaattttcaaggtgctcaggtgagaaatgggaactacaactgattactcaagttgagccctggtgatacaggataaggacctgggctttaaactactacataacaaaaaaaaaaaaataaagaaaaaaaaaaactagcgtaaccagcaacctgtcagaggtttcttcaacagcagcagtgatacgcaatcttgtttctgtaactatctcagcgatcttgggaagcattcaaaacaagcaaatgtacactgatgtgtgtctgtagggatgtgggcccatcccaggttccagctagggcctaaccatggttgttcttcagtctcattactgttcctttgaaaaaccaagatttagccaggcaagggggctcatgcctataatcccagcactttgggaggccaaggcaggcagatcacgaggtcaggagtttgagaccagcctggccaacatggtgaaaccccatctctactaaaaatacaaaaattagccggacatggtggcgggcacctgtaatcccagctactcagggggctgaggcaggagaatcgcttgaaccccagacgcggaggttgcagcgagccgagatcgcaccattgcactccagcctgggcgacagggactctgtcaaaaaaaagaaaacaaaacaaaagaaaaaccaagatttgaccatagttttatttaaatcagtaactttgtagtatctgtgacccccccaccccacacacaccctccacgcttaaaccggttattattttaaaaccgactatacagaaaaatcaggccaggtgcagtggctcacgcctgtaatcccagcactttgggaggccaaggcaagcagatcacctgaagtcgggagttcgagaccagcctgaccaacatggagaaaccctgtctctattgaaaatacaaaattagctgggcgtgatggtgcatgcctgtaatcccagctacttgggaggctgaggcaggagaatttcttgaacccgggaggcggaggttgcggtgagccaagatcacgccactgcactccagcctgggcaacaagagcgaaactccgtctcaaaataaaaaaaaagaaaagaaaagaaaattcatctttttttggtgagtgagggggaagaaggaaggagaaggtgacaaagacagcatgtcataactccaaaggccagaagtaattttaagatctttgtcaaacaaaatctccaacctacgtgaactaaatgtcatgtcttaaaatagcccttgttaactgaatacctgccctaattttcaaaagtcctgaattctgagtttctatggtttggactacaattggacttaaagttgtcttattccatttaagaacattttcttgcatctcgcattttggaagaactccaaaaaaaatttaaaactctcggctgtgcgcagcggctcaagcctgtaatcccagtgagaggccaaggcgggcggatcacaagatcaggagatcgagaccactctggctaacgtggtgaaaccccgtctctactaaatatacaaaaattagctgggcatggtggcgggcacctgtaatcccagctactcgggaggctgaggcaggagaatcacctgaaccagggagtcgggggttgcagtgagccaagatcgcgccactgcactggcctggcaacagagcgagactccatctcaaaaaaataaaaaataaaaaacttaaaactcccaaagcaggaatgcagaagattggaattggggaatggaaatctacctttaaaaaataaaaaaggccaggcgcagcggctcacacctgtaatgccagcactttgggaggccgagatgggcagatcacttgagatcaagacttcgagacaagcctggccaacatggagaaaccccctctgtactaaaattacaaacattagccgggcacggtggtgggtgcctgtaatcccagctacttgggaggcttaggcaagagaatcacttgaacctgggcggtggaggttgcagtgaaccaagatcatgccattgcactccagattgggcaacagagtgagactccatataaaaaataataataaaaataaagtttaaaaaggagcttaaaaccatgagttgttaggtacacaatggccatgcatttggggcctgatcaattctcccagtcgtcatcttttcacttctccctacactttgcatgcagtgacagttgcctgaattgcaggcccaggcagaaccttaaaagaatgttttagggcgggcgtggtggctcacacctgtaatcccagcactttgggaggccacagtgggcagttcatgaggtcaagagatcgagaccatcctggccaacatggtgaaaccccatctctactaaaaatacaaaaattacctgggcgtggtggcacacgcctgtggtcccagctactcaagaggctgaggcaggataattgctcgaacccaggaggcggaggctgcagtgagctgagaccgcaccactgcactccagccttggcaacaagagcaaaactccatctcaaaaaaataaataaataccaactgtacggaactgtctaggacagcatttctcaaactatctatggcaaaggagtagtttttataatttctagtctgtcccagaccactacatagccctactgtgcatgactaataaccagttcccttcatctgcaaagcattccagttcagagacacctagaactggtctctaagtgcttggatgttgcaacaatgtcaaactgttaagtttctaaacactctcaatttctgtagtcatctctttgcagataacatagtttgcagactcacactggtctgcagactaccctttgagtagtactgttccacagcagtgggtatccaatggggatttggcgtaccgtggacatttggcaatgtctggagagattttgactatcttgattaggagtagggggtgctactggtatctaaaggctggggatgccaccaaacttcttacagtgtttatcatagcccccccactgcccctcgccccctgaaatcatttatccaacatgtcgtaatatccaggttgagaaaccctgttctgaaggatcgagtgggataatgtgtggaaactatttagtagagtgctaggtacacagtaagtcgtcaacacatggcaaacactgagttcatgtagagtcaagataatccaaaatgatactaatagccactttgtagatatacagatgtaccaaggagatacagtgggaagggaagactttggcgaggggcagatttattgtgaagtttgccaagctttaagttccagaactccttccaaagccaaagccatgcacacacacatatttacgcagcgtgtgtgtgtgttgaagatatcctcccacaacttatgtttcaagcccccaaacaggttctagtattggcctcatcatttcctagctatgtaactttgggcaaataacttcacttctctgagtttcattttccttatctgaaaaatagagctgcaacatcaggtgcggtggctcacacttgtaatcccaacactttgggaggccgaggcaggaggattgcttgagcccaagagttcgagacccccacctctacaaaaagtaaacaacaacaacaacaaaatgagccaggtgtggtggtgcacgcctgtagtcccagctactcgcccgggatgctgaggtggcaggatcacttaaacccaggaggccgaggctgcagtgagccaagatcgtgccacagcactccagcctgggtgacagaggagacactattgtaaaagaaaaaaaaagggctgcaaaccgtacgtttctcattaagttattgtaaggctcaaatgaattcgcgtatacaaagtgcgtagcacaagacatgggatgtaggaaatgctcaaaaactgttatcatttttgcaataaatactggctcctctgggaaagaagaggggtggggtaaatgatgtgccttgttgcctagcctgagcccacactgccagagaggagaggacccagaatgagacccaggtctcccgattgcagttcattcatgggcaagcagtacatattgagagcttactggacaccatgccaggcttgagaccagcctggccaacatagtgaaaccccatctctactaaaaatacaaaaattagccaagtgtggtggtgtgcgcctgtaatcccagctactcggcaggctgaggcaggagaattgcttgaacctgggaggcgaaggttctggcacatattgagcacttgctgagaggcaaagttcaggccttctgccccaggcttttggagagggagtctcggggccccctgaggggcctcacctgcaccccccgcactcacccatctccccactctatcccctgtccgctccgtacatgcccggctccagcacccggagcagtgaaagctcaggcactacccgccgcccgccagcccgagggccgctcacccaggttctgccctcgcagcaccgcgtacggccggctccgctccagcggatccacggggctcggggcctctgcctcccccaccaggaggctgcagaggccaaggtacagccacggtaacgctggacgcagcatcttccccagccctgcagaagcagagaggccacttccgtcgcaagccctgcctctgtctcctcccaggtctctctgcgtcgctgccaccgcccttagggcgcgcgtcattgccatggtaactgtgcgtcctggtctaagttccgcttctgcctaagatttgttccggattaacgttcctcaataactaatgtttcccccggaccaactttccgttcagatcaactttccgtctgtgccaacgttcgccgcgattaccgttctgctgtggttagcgttccctcatccattggggtcgaggtcttgtaggtccatttggggcctattgaagattttttacgaatccatgcattttcttattaaaccttcattacgggcctggaaaatagatactgtgtttctatagtacaaatgccatcttctcagggagcccttgcccagacatccttttctaaaattgcaaccctccctttcccttaatgtacattctccctaccttcgttctcttccattccccccattcactttagactcatcaccatttaccttatacatttaacgtacatttgatgattttctgaggacctgctccgccctagcatgtaaagtccacgagcacagcgattttgttcttgctctctgctctgtcccagagactgggggagagagagaccctctcattttgttttatattgttttatactcagtacctgttttaagaagaaacaacaaggaagtgaaaccaaagacgggcagcccggcgccaggcccgaaaccaggcctgggcctgcctggcctaaacccagtttcatgtgtgtgaagagaccaccaaacgtgtgtgaagagaccaccaaacaggctttgtgtgagcaacatggctgtttatttcacctgggtgcaggcgggctgagtccgaaaagagagtaagcaaagggtggtggattatcattagttcttacaggttttgggataggcggtgaagttaagagcaatgttttgcgggcaggggtggatctcacgaagtacattctcaagggtagggagaattacaaagaaccttcttaaggttgggggagattacaaagtaccttaagggtgggggagattacaaagtacattgatcagttagggtggggcagaaacaaatcacaatggtggaatgtcatcagttaaggctatttttacttcttttgtggatcttcagttacttcaggccatctggatgtatacgtgcaagtcacaggggatgcgatggcttggcttgggc

SEQ ID NO: 909 - DNA, 3688 bp, Homo sapiens
gaagctggggacaggtagacggaactttccgcgtggagatctttggccaagagaatgagcctcagctctgttctgtgggctgcactgagtttctcggtgtgagctggagaatgtggaggctgtggacccacgaggtcgaacattattgcatcttgctgtttccttgggacatttggaatctgctcgagtcttactccgacataaagcagatgtgacaaaagaaaatcgccagggatggacagttttacatgaggctgtgagcactggcgatcctgagatggtgtacacagttctccaacatcgagactaccacaacacatccatggcccttgagggagttcctgagctgctccaaaaaattctcgagacaactgggcggagttaatggaagtcaaccatgatgacaaagtggtcaccaccgaacgcttcgacctttcccaagaaatggagcgcctcactctggacttgatgaagccaaaaagcagggaagttgagcggcggctcacaagccctgtcattaacaccagcctcgatactaaaaatattgcttttgaaagaactaaatccggattctggggctggaggacagataaagcagaagttgttaatggttacgaagcaaaggtttacacagtaaacaatgtgaatgtgatcaccaaaatacgcacagaacatctgaccgaggaggaaaaaaagagatataaagacaggaacccgctggaatctttgctgggaactgtggaacaccaatttggtgcacaaggggacctcaccacggaatgtgctactgcaaacaaccccacagccatcacgcctgatgagtacttcaatgaagagtttgatctgaaagacagggacattggaaggccgaaagagctgacgattagaacacagaagtttaaagcaatgttgtggatgtgtgaagagtttcccctctctctggtggagcaggtcattcccatcattgacctaatggctcgaacgagtgctcattttgcaagactgagagatttcatcaaattggaattcccacctggatttcctgtcaaaatagcttcccacatcacaaactttgaggttgatcaatctgtgtttgaaattcccgaatcttactatgttcaagacaatggcagaaatgtgcatttgcaagatgaagattacgagataatgcagtttgccatccagcaaagtctgctggagtccagcaggagccaggaactttcaggaccagcttcgaatggagggatcagccagacaaacacctatgacgcccagtatgagagggccatccaggagagcctcctcaccagcacagaaggcctgtgccccagcgccctgagcgagacaagccgttttgataatgacttgcagctagccatggagctctctgccaaagagctggaggaatgggagctccggctccaggaggaagaggctgagctccagcaagtcttacagctgtcactcactgacaaatagacctttcagcctgtgagcctctgcacaaagcagaggctgtgggctgtcacagatgctgtgtcaaccagggccctagggctaagggcctgcaccttgcgtgcatgcagcaggcaacaactgccccttctttatgcagaggtgcagaaccagggactcctgggcccatccaggctgctccctggggtggagaagggaccagggattgcaggccccatctccaggctaaggggaggagagcatcatcactttccattagctgtattggcttgcaggtcacatttttactaccagctttagacaaaaccccaatccccgcaggtttgtagataaatttttatcaaggagtgataacaagacaagttattgcagagtcagggtgcttttatatataagagcagcagccgcctttgtaaagtgtgatctatgagaattggagacacttctttactgttcaccaaagaaatgggtaatctgtgctgatctccttatttttacctttttacagggtttctaggacattgtcattattcttcctccatctatctgattccattccttccacacccagctaaagttagaggagatacatatagaatctattttagattattgttaactatttgcatcaaattaagatacacaaatggccatggatgttgccttagccttaaacattactaatagtttcacatcacctcactgcacgcatcgaaggatctgatttgaatttgtaaaggcaattcttttgagagcaggattctccaggctaaatcaaaggcagctaatcctgtccctgaaggagcagctaggggaacctgaggcttgttcttgaagtgggcaagctggccaaaatattggaacacacagaaccaaaccaggtgtgttctacacctgcatgagtgaaggatttccacgtagacacctaggaagagcccgcatgccctagactcactccagaggaaggattgatttgcaaccagaaagggagctgaaaaccacggagctccatggctcttcattcaaaagggaaaataatgattccacgttgctttttagagttcaaatcaacatctttctggataaatctattttttaacaatctttttattatttgtaaaagatataaaaacaactcccatcagtagcaatacaaggttatacattttaaccagattttctcaggccttttttggatacctttagtagttaactctcttttgtcaaaccctcttgtatataaccatcgcacaacatacagaaccctggggaatacagccaagggcactgctcactgtggcccgtgtattcattcccacaggctgcactgaaataacctggtaaacaacaccctcctccattttgcgtctatttcttctattgtgcttctttggggataggaagagaaacataactactgttccaggtaacgtctgtatcatacagttagtgttgccagtgaaacgttcccagatacaaagaattgtgcttttaattccatttcacaatctgttttgttttttttttttgtcattgtctgaccaaaattccttctgcacatgaggccagtataggcaacgtcacatttgtttgtttcaaatatgcagtgtggtattttgtttactttgcatttaccgtgagcaaagatacttcttggaatggctgcagtgaggccgtgtcattggctcacaaaagtgactcataggtaatttctgtgtttgcattccactgctctgctccctaaggtccttgactttctccccaggaattcacttaaaaagggactgagcattgtgtcaacctgttgcagtgtttttcatatatgtgttcactctaaaaatgcaaataaagactgcttccttagagggtgctcatacaaaattccagtctttgagtctttttccttttcagttttttctagtcactggatgtacccacacttcctgttacgtatgtcagtagaacattagaatgcctcacttcgctcagttcatcactgcaaaggtggcatgctcctcccagccttcctgcccaggttaacaagccccatgctgcttgtttcaaatggcaactaaaagcaagccagtgttgggctgttctgacacctctgtggtcctcctggaggggaactggctcttgtggggtaagggaagcccagccaacatcaaagctctgcatcaatgctatcccttgaagccaactgctttgtgag

SEQ ID NO: 910 - protein, 362 aa, Homo sapiens
MEVNHDDKVVTTERFDLSQEMERLTLDLMKPKSREVERRLTSPVINTSLDTKNIAFERTKSGFWGWRTDKAEVVNGYEAKVYTVNNVNVITKIRTEHLTEEEKKRYKDRNPLESLLGTVEHQFGAQGDLTTECATANNPTAITPDEYFNEEFDLKDRDIGRPKELTIRTQKFKAMLWMCEEFPLSLVEQVIPIIDLMARTSAHFARLRDFIKLEFPPGFPVKIASHITNFEVDQSVFEIPESYYVQDNGRNVHLQDEDYEIMQFAIQQSLLESSRSQELSGPNGGISQTNTYDAQYERAIQESLLTSTEGLCPSALSETSRFDNDLQLAMELSAKELEEWELRLQEEEAELQQVLQLSLTDK

SEQ ID NO: 911 - DNA, 4038 bp, Homo sapiens
atgagagtggtgttttggtgggaatccagctagagaatgtaattttattctgacccaaattatctgtgctttcagttttgattaaggtcctatacttcctattctagacttgaatgctgatatgtgcttgagaaatcccccatgttcagtgttgtccggtgattgcatttcatgaaagctcctggccttatttagacttaatttgagtgctgttgagagcttaaacttgtgttggatgatctggagccttttccttcacagaatgtggaggctgtggacccacgaggtcgaacattattgcatcttgctgtttccttgggacatttggaatctgctcgagtcttactccgacataaagcagatgtgacaaaagaaaatcgccagggatggacagtttctgaataaaggccagtctcaatcatacttttccttggacactggcgatcctgagatggtgtacacagttctccaacatcgagactaccacaacacatccatggcccttgagggagttcctgagctgctccaaaaaattctcgaggctccggatttctatgtgcagatgaaatgggaattcaccagctgggtgcccttggtttctagaatatgcccaaatgatgtctgtcgcatctggaaaagtggtgccaaactgcgcgtcgatatcacattgctgggatttgaaaacatgagctggataagagggaggcgtagttttatatttaagggagaagacaactgggcggagttaatggaagtcaaccatgatgacaaagtggtcaccaccgaacgcttcgacctttcccaagaaatggagcgcctcactctggacttgatgaagccaaaaagcagggaagttgagcggcggctcacaagccctgtcattaacaccagcctcgatactaaaaatattgcttttgaaagaactaaatccggattctggggctggaggacagataaagcagaagttgttaatggttacgaagcaaaggtttacacagtaaacaatgtgaatgtgatcaccaaaatacgcacagaacatctgaccgaggaggaaaaaaagagatataaagacaggaacccgctggaatctttgctgggaactgtggaacaccaatttggtgcacaaggggacctcaccacggaatgtgctactgcaaacaaccccacagccatcacgcctgatgagtacttcaatgaagagtttgatctgaaagacagggacattggaaggccgaaagagctgacgattagaacacagaagtttaaagcaatgttgtggatgtgtgaagagtttcccctctctctggtggagcaggtcattcccatcattgacctaatggctcgaacgagtgctcattttgcaagactgagagatttcatcaaattggaattcccacctggatttcctgtcaaaatagaaattcccttgtttcatgtcttaaatgcacggattacatttggaaatgttaatggctgtagcactaaatgtgcatttgcaagatgaagattacgagataatgcagtttgccatccagcaaagtctgctggagtccagcaggagccaggaactttcaggaccagcttcgaatggagggatcagccagacaaacacctatgacgcccagtatgagagggccatccaggagagcctcctcaccagcacagaaggcctgtgccccagcgccctgagcgagacaagccgttttgataatgacttgcagctagccatggagctctctgccaaagagctggaggaatgggagctccggctccaggaggaagaggctgagctccagcaagtcttacagctgtcactcactgacaaatagacctttcagcctgtgagcctctgcacaaagcagaggctgtgggctgtcacagatgctgtgtcaaccagggccctagggctaagggcctgcaccttgcgtgcatgcagcaggcaacaactgccccttctttatgcagaggtgcagaaccagggactcctgggcccatccaggctgctccctggggtggagaagggaccagggattgcaggccccatctccaggctaaggggaggagagcatcatcactttccattagctgtattggcttgcaggtcacatttttactaccagctttagacaaaaccccaatccccgcaggtttgtagataaatttttatcaaggagtgataacaagacaagttattgcagagtcagggtgcttttatatataagagcagcagccgcctttgtaaagtgtgatctatgagaattggagacacttctttactgttcaccaaagaaatgggtaatctgtgctgatctccttatttttacctttttacagggtttctaggacattgtcattattcttcctccatctatctgattccattccttccacacccagctaaagttagaggagatacatatagaatctattttagattattgttaactatttgcatcaaattaagatacacaaatggccatggatgttgccttagccttaaacattactaatagtttcacatcacctcactgcacgcatcgaaggatctgatttgaatttgtaaaggcaattcttttgagagcaggattctccaggctaaatcaaaggcagctaatcctgtccctgaaggagcagctaggggaacctgaggcttgttcttgaagtgggcaagctggccaaaatattggaacacacagaaccaaaccaggtgtgttctacacctgcatgagtgaaggatttccacgtagacacctaggaagagcccgcatgccctagactcactccagaggaaggattgatttgcaaccagaaagggagctgaaaaccacggagctccatggctcttcattcaaaagggaaaataatgattccacgttgctttttagagttcaaatcaacatctttctggataaatctattttttaacaatctttttattatttgtaaaagatataaaaacaactcccatcagtagcaatacaaggttatacattttaaccagattttctcaggccttttttggatacctttagtagttaactctcttttgtcaaaccctcttgtatataaccatcgcacaacatacagaaccctggggaatacagccaagggcactgctcactgtggcccgtgtattcattcccacaggctgcactgaaataacctggtaaacaacaccctcctccattttgcgtctatttcttctattgtgcttctttggggataggaagagaaacataactactgttccaggtaacgtctgtatcatacagttagtgttgccagtgaaacgttcccagatacaaagaattgtgcttttaattccatttcacaatctgttttgttttttttttttgtcattgtctgaccaaaattccttctgcacatgaggccagtataggcaacgtcacatttgtttgtttcaaatatgcagtgtggtattttgtttactttgcatttaccgtgagcaaagatacttcttggaatggctgcagtgaggccgtgtcattggctcacaaaagtgactcataggtaatttctgtgtttgcattccactgctctgctccctaaggtccttgactttctccccaggaattcacttaaaaagggactgagcattgtgtcaacctgttgcagtgtttttcatatatgtgttcactctaaaaatgcaaataaagactgcttccttagagggtgctcatacaaaattccagtctttgagtctttttccttttcagttttttctagtcactggatgtacccacacttcctgttacgtatgtcagtagaacattagaatgcctcacttcgctcagttcatcactgcaaaggtggcatgctcctcccagccttcctgcccaggttaacaagccccatgctgcttgtttcaaatggcaactaaaagcaagccagtgttgggctgttctgacacctctgtggtcctcctggaggggaactggctcttgtggggtaagggaagcccagccaacatcaaagctctgcatcaatgctatcccttgaagccaactgctttgtgag

SEQ ID NO: 912 - protein, 348 aa, Homo sapiens
MVYTVLQHRDYHNTSMALEGVPELLQKIAPDFYVQMKWEFTSWVPLVSRICPNDVCRIWKSGAKLRVDITLLGFENMSWIRGRRSFIFKGEDNWAELMEVNHDDKVVTTERFDLSQEMERLTLDLMKPKSREVERRLTSPVINTSLDTKNIAFERTKSGFWGWRTDKAEVVNGYEAKVYTVNNVNVITKIRTEHLTEEEKKRYKDRNPLESLLGTVEHQFGAQGDLTTECATANNPTAITPDEYFNEEFDLKDRDIGRPKELTIRTQKFKAMLWMCEEFPLSLVEQVIPIIDLMARTSAHFARLRDFIKLEFPPGFPVKIEIPLFHVLNARITFGNVNGCSTKCAFAR

SEQ ID NO: 913 - DNA, 4231 bp, Homo sapiens
ccgcgagctgtcagcgcgggcgggaacgccgcggggcgcggggtgggcgcggccgacctggtccctgagccggccggcgaccccggacctcccgcgcgccccgcacccgaccggctcagccggccggcagcgtaacacgccctacgctcgcttgctcgccggcctcagggcaggcaggcgggcgcgggagaccccgccggggccgagacttggggcgggcgacgaggaccaggttacggcctcctcgccatgtcctcggcctgcgacgcgggcgaccactaccccctgcacctcctagtctggaaaaacgactaccggcagctcgagaaggagctgcagggccagaatgtggaggctgtggacccacgaggtcgaacattattgcatcttgctgtttccttgggacatttggaatctgctcgagtcttactccgacataaagcagatgtgacaaaagaaaatcgccagggatggacagttttacatgaggctgtgagcactggcgatcctgagatggtgtacacagttctccaacatcgagactaccacaacacatccatggcccttgagggagttcctgagctgctccaaaaaattctcgaggctccggatttctatgtgcagatgaaatgggaattcaccagctgggtgcccttggtttctagaatatgcccaaatgatgtctgtcgcatctggaaaagtggtgccaaactgcgcgtcgatatcacattgctgggatttgaaaacatgagctggataagagggaggcgtagttttatatttaagggagaagacaactgggcggagttaatggaagtcaaccatgatgacaaagtggtcaccaccgaacgcttcgacctttcccaagaaatggagcgcctcactctggacttgatgaagccaaaaagcagggaagttgagcggcggctcacaagccctgtcattaacaccagcctcgatactaaaaatattgcttttgaaagaactaaatccggattctggggctggaggacagataaagcagaagttgttaatggttacgaagcaaaggtttacacagtaaacaatgtgaatgtgatcaccaaaatacgcacagaacatctgaccgaggaggaaaaaaagagatataaagcagacaggaacccgctggaatctttgctgggaactgtggaacaccaatttggtgcacaaggggacctcaccacggaatgtgctactgcaaacaaccccacagccatcacgcctgatgagtacttcaatgaagagtttgatctgaaagacagggacattggaaggccgaaagagctgacgattagaacacagaagtttaaagcaatgttgtggatgtgtgaagagtttcccctctctctggtggagcaggtcattcccatcattgacctaatggctcgaacgagtgctcattttgcaagactgagagatttcatcaaattggaattcccacctggatttcctgtcaaaatagaaattcccttgtttcatgtcttaaatgcacggattacatttggaaatgttaatggctgtagcactgccgaagaatctgtatctcaaaatgtggaagggacccaggctgattcagcttcccacatcacaaactttgaggttgatcaatctgtgtttgaaattcccgaatcttactatgttcaagacaatggcagaaatgtgcatttgcaagatgaagattacgagataatgcagtttgccatccagcaaagtctgctggagtccagcaggagccaggaactttcaggaccagcttcgaatggagggatcagccagacaaacacctatgacgcccagtatgagagggccatccaggagagcctcctcaccagcacagaaggcctgtgccccagcgccctgagcgagacaagccgttttgataatgacttgcagctagccatggagctctctgccaaagagctggaggaatgggagctccggctccaggaggaagaggctgagctccagcaagtcttacagctgtcactcactgacaaatagacctttcagcctgtgagcctctgcacaaagcagaggctgtgggctgtcacagatgctgtgtcaaccagggccctagggctaagggcctgcaccttgcgtgcatgcagcaggcaacaactgccccttctttatgcagaggtgcagaaccagggactcctgggcccatccaggctgctccctggggtggagaagggaccagggattgcaggccccatctccaggctaaggggaggagagcatcatcactttccattagctgtattggcttgcaggtcacatttttactaccagctttagacaaaaccccaatccccgcaggtttgtagataaatttttatcaaggagtgataacaagacaagttattgcagagtcagggtgcttttatatataagagcagcagccgcctttgtaaagtgtgatctatgagaattggagacacttctttactgttcaccaaagaaatgggtaatctgtgctgatctccttatttttacctttttacagggtttctaggacattgtcattattcttcctccatctatctgattccattccttccacacccagctaaagttagaggagatacatatagaatctattttagattattgttaactatttgcatcaaattaagatacacaaatggccatggatgttgccttagccttaaacattactaatagtttcacatcacctcactgcacgcatcgaaggatctgatttgaatttgtaaaggcaattcttttgagagcaggattctccaggctaaatcaaaggcagctaatcctgtccctgaaggagcagctaggggaacctgaggcttgttcttgaagtgggcaagctggccaaaatattggaacacacagaaccaaaccaggtgtgttctacacctgcatgagtgaaggatttccacgtagacacctaggaagagcccgcatgccctagactcactccagaggaaggattgatttgcaaccagaaagggagctgaaaaccacggagctccatggctcttcattcaaaagggaaaataatgattccacgttgctttttagagttcaaatcaacatctttctggataaatctattttttaacaatctttttattatttgtaaaagatataaaaacaactcccatcagtagcaatacaaggttatacattttaaccagattttctcaggccttttttggatacctttagtagttaactctcttttgtcaaaccctcttgtatataaccatcgcacaacatacagaaccctggggaatacagccaagggcactgctcactgtggcccgtgtattcattcccacaggctgcactgaaataacctggtaaacaacaccctcctccattttgcgtctatttcttctattgtgcttctttggggataggaagagaaacataactactgttccaggtaacgtctgtatcatacagttagtgttgccagtgaaacgttcccagatacaaagaattgtgcttttaattccatttcacaatctgttttgttttttttttttgtcattgtctgaccaaaattccttctgcacatgaggccagtataggcaacgtcacatttgtttgtttcaaatatgcagtgtggtattttgtttactttgcatttaccgtgagcaaagatacttcttggaatggctgcagtgaggccgtgtcattggctcacaaaagtgactcataggtaatttctgtgtttgcattccactgctctgctccctaaggtccttgactttctccccaggaattcacttaaaaagggactgagcattgtgtcaacctgttgcagtgtttttcatatatgtgttcactctaaaaatgcaaataaagactgcttccttagagggtgctcatacaaaattccagtctttgagtctttttccttttcagttttttctagtcactggatgtacccacacttcctgttacgtatgtcagtagaacattagaatgcctcacttcgctcagttcatcactgcaaaggtggcatgctcctcccagccttcctgcccaggttaacaagccccatgctgcttgtttcaaatggcaactaaaagcaagccagtgttgggctgttctgacacctctgtggtcctcctggaggggaactggctcttgtggggtaagggaagcccagccaacatcaaagctctgcatcaatgctatcccttgaagccaactgctttgtgag

SEQ ID NO: 914 - protein, 586 aa, Homo sapiens
MSSACDAGDHYPLHLLVWKNDYRQLEKELQGQNVEAVDPRGRTLLHLAVSLGHLESARVLLRHKADVTKENRQGWTVLHEAVSTGDPEMVYTVLQHRDYHNTSMALEGVPELLQKIAPDFYVQMKWEFTSWVPLVSRICPNDVCRIWKSGAKLRVDITLLGFENMSWIRGRRSFIFKGEDNWAELMEVNHDDKVVTTERFDLSQEMERLTLDLMKPKSREVERRLTSPVINTSLDTKNIAFERTKSGFWGWRTDKAEVVNGYEAKVYTVNNVNVITKIRTEHLTEEEKKRYKADRNPLESLLGTVEHQFGAQGDLTTECATANNPTAITPDEYFNEEFDLKDRDIGRPKELTIRTQKFKAMLWMCEEFPLSLVEQVIPIIDLMARTSAHFARLRDFIKLEFPPGFPVKIEIPLFHVLNARITFGNVNGCSTAEESVSQNVEGTQADSASHITNFEVDQSVFEIPESYYVQDNGRNVHLQDEDYEIMQFAIQQSLLESSRSQELSGPNGGISQTNTYDAQYERAIQESLLTSTEGLCPSALSETSRFDNDLQLAMELSAKELEEWELRLQEEEAELQQVLQLSLTDK

SEQ ID NO: 915 - DNA, 182722 bp, Mus musculus
  misc_feature (1)...(182722): n = A, C, G or T/U
aatccattcctggtcataagcccccaaagaactgggccttgtgtgtgtgtgtgtgtgtgtgtgtgtgtggtgtataaacgcctttaatcccagcaccgaagaggcagatgggtctctgtgtgttcaaggccagcctggtcttcacagagagttccgggccacccagggctatacagtgagaccctgtctcaaagaaacaggaatgggagcagagtgttgaacagacatttggacaccagctctcactcaggaggtggaggcagggttagggcggtagctcagtgcttaagactgcctgctgctcttccagaggaccagagtttcctgcccagcaccacgtgggacagatcacagcagcctgtaactccagccccgggggattccatgtcctcctctgccctctgtggccattgcatgcttctgtctcctctgtgcctgtctgtgttacacacacacacacacacacacacacacacacacacacacacacaccagattagaaagaaaaaaatccccaaaggttgaaacattatagatgtcaatcaacatatatggatggatgtttagaaagagaaggaaaaaaaagtctccaaaggtagaaacatcacaactgtcaatcaccacatacagagatttttcaacatggagtattgggctatgtataatggtaaacatctttagttccaacactcaggaggcagaggcagaaggatctcagggagtttgaggccagcctgttctacagagtgagttccagaccaaccccaggttacacagagaaatcctgtctcaaacaaacaaacaaacaaacagatggacagacagaccaaaaaaaaaaaaaaaaaaaaaaaaaaaaagcatgtttgggccagcaaagatggatcatcagggaaaggcgctttttcaagacagggtttctctgtgtagccctggctgtcctggaactcactctttaaaccaggctggcctcgaaactcagaaatctgcctgcttgtgccttcgaggtggggtttctttgtagaatgccaccctctcaacaatgctgtccctcaacacctctcggatgatggtaattctccctggccccaccctagactctgtgaaccttcctagtggttcatttttctctgtggctcattttactgactgaccctgatcattgtttgtcactgtcactagaaaaggagtgacttagcccgggaactgtgtttccccgggtgggcagccataccttgcgcctgttgggcaagcgctctaccactgaaccatacacatgggctaatcagggggttctaacaactaaaccggtgttagcaaaaagtagacacctgataagtgtgtccatgcgtgtacatgtgtgtgcgtgcaagcatctgtcccccaaagcttgagcagtgcctggctcttaggactccctcagtgagtttgtagtggctgaacagcagaagatgccagcaaaggccacataggaaatagataggagctgaggacagcggtgcactttatgaccctggtacctgggaggcagagacagaaggattgcaagggtaagtctagcgcgtgtgtgtgtgtgtgtgtgtgtgtgtgtgtgtgtgtatgcgcacgtgagttaccaaacttgtgnnnnnnnnnnnnnnnnnnnncattgtttgtcactgtcactagaaaaggagtgacttagcccgggaactgtgtttcccccgggtgggcagccataccttgcgcctgttgggcaagcgctctaccactgaaccatacacatgggctaatcagggggttctaacaactaaaccggtgttagcaaaaagtagacacctgataagtgtgtccatgcgtgtacatgtgcgtgcgtgcattcgcgcgcgcgcgcgcgtgtgtgtgtgtgtgtgtgtgtgtgtgtgtgtgtgtgtgtgtgtgtgtgtgtgtatgcgcacgtgagttaccaaacttgtgatatctgatgaggtcttcatagtcccctaactcaagacgtaatgaaatcattttagtcaccaaattttttattatcatccggttcttggtttgtttcactctattttatttggagatggagtcttttgatgtagcccaggctagacttacccttgcaatccttctgtctctgcctcccaggtaccagggtcataaagtgcaccgctgtcctcagctcctatctatttcctatgtggcctttgctggcatcttctgctgttcagccactacaaactcactgagggagtcctaagagccaggcactgctcaagctttgggggacagatgcttggagcaaactgaacataatcctagggtgagggtgggcatggggcgggagtgggggtgaaggtttaaaaatgaatattaggttgacaagaaaggtggaatttggtcttattaaacatcactatgcagatttaagatgagccccgctggaaggtatggagtggatttttttttaagatttacttatttattatatgtaagtactctgtagctgtcttcagacacaccattggagggcatcagatctcattacagatggttgtgagccaccatgtggatgctaggatttgaactcaggacctccagaagagcagtcagtgctcttacctgctgagccatctctccagcccagtggagtggatttaattataattcaaggtttgggtgtttgttttcttggagctccgccaaggcacatgacaccggccgtccatagccggtgtatgctttcatcagcgctgagagattggcattcatcgagtctctgtcacgcacaggtttctggtctgttgtcagtactaattatgctaaggatcctgaaaaagaagacctgggcaactgcagggatttaatgacatttttttccccagttgccctgagagaaaagttgatgtgagttttatatgcttaagcgacttgtagtgtaatgaattggggtttgtgacactaccctgaagccagcaagctgaaggaatttttcattgtattctctttttttttttttttttttgagacacactctcacaatgtagtactgagaacttaccatgaaaaccaggctggcctcaaattcccagtgattggcctgtttctgcctcccaagtgctgggataaaaggcgttcaccatcatgctagaaaggactgtttttatagtttgtaacattgtgtgtatgtctttttgtctgtctgtctgtcagaggttgacctcaggtgtcctactcacttgttttcccacattattattttggggcacgggggaggacagcgtctctctgtctcagtaattcagtcagagttgttggccaccaagccccagcctgccctcctgtctctgcctccccaaggctggcacaggctgctgcccctggctctccatcagccctagggactgattgcaggttctcatatttaaatggcactcttccaactaagtcaccccccaccccacccccagccctcttcttcttgttgattgcggcagggtctcaggctgtgctagcctgacctaccactcacgtgaagcccaggctgacctgtgcttatagcaatgcatttctctccttccagagccctggggttacaggtgtgagccgtgctcagatgccggaagcattcctgaagaaacataactagccaaaaagcctgagcatcgtagaaaatgaactataatcaagtagcagagaaaccagtagccatttaattatgttttgaaaatgtatctttcctcgctaggctagaatgttttttgttttgttttcttttgttttgtttttgtttttttgtttttggtttttcgagacagggtttctctgtgtagccctggctgtcctggaactcactctatagaccaggctggcctcaaactcagaaatccgcctgcctctgcctcccgactgctgggattaaaggcgtgcgccaccacgcccagctttatctatggtttaagaaggaaaacatagattcagaactacccactcaaacccagagacagcattgggaaagtgtctggctctgagagaccttgtaacaatccaccaagattgtcatcatagttaaaatttgggaaatatttatttactttttaaaaattagcttataaacgctactagtttaaataaattacatttcatgtgttcagtgggaattttcacatcatacatgtgtgacaggttagttcttaggccaaggtaagttttgtctaacaggggacatgtagagcacagagggtttttaggtccgtgaaactattctctgtgatcttgttaggtgtctatacactatcatatgttgtccaaacccacgggacagagtgggacatagggtgactacagaataaacctcacctcagatatgtacccccaaagaaatggaaacatctccgtgttcctgacaaattactccacagccaaagtgttaacttccagtgcaaattatggattctccatcgtcagttgcaatccacggtacctctgtggtggaggatggcatagatgggtggggcaggtatggggcagacctctctctgcagcttctgccaagaacttaggtttactctagatggctcagtggttaaaggcattgactgctcttccagaggtcctgagttcaattcccagccaccacgtggtggctcacaaccatctgtaatgggctcagaggccctcttctggtgtgtctgaagacagctacaatgtattcatatataataaaataaataatcttttaaaaaagagttaagtctaacaatcagatggctttgtggtcttgatcttacaacagttgtcagaagacatgctgtcatggggcagggagggttcaccctgtcctttgagaaccaaaaggcagatcgataggaagttggtctctctggggacattttctacagtggtggaaacttgggtagggtttatgctcttgtaatttctctcccagggtcttgtaacgaaaccaaaccaaaccaaaccaaacccatcctaaaaaggcagttggagagaagatgggccagcagccgttgagtgtcgtgttttataaaaagataaggaaggcagggatgtttgttctggaggcagggtatggtgnnnnnnnnnnnnnnnnnnnnnnnnnnnnnnnnnnnnnnnnnnnnnnnnnnnnnnnnnnnnnnnnnnnnnnnnnnnnnnnnnnnnnnnnnnnnnnnnnnnnnnnnnnnnnnnnnnnnnnnnnnnnnnnnnnnnnnnnnnnnnnnnnnnnnnnnnnnnnnnnnnnnnnnnnnnnnnnnnnnnnnnnnnnnnnnnnnnnnnnnnnnnnnnnnnnnnnnnnnnnnnnnnnnnnnnnnnnnnnnnnnnnnnnnnnnnnnnnnnnnnnnnnnnnnnnnnnnnnnnnnnnnnnnnnnnnnnnnnnnnnnnnnnnnnnnnnnnnnnnnnnnnnnnnnnnnnnnnnnnnnnnnnnnnnnnnnnnnnnnnnnnnnnnnnnnnnnnnnnnnnnnnnnnnnnnnnnnnnnnnnnnnnnnnnnnnnnnnnnnnnnnnnnnnnnnnnnnnnnnnnnnnnnnnnnnnnnnnnnnnnnnnnnnnnnnnnnnnnnnnnnnnnnnnnnnnnnnnnnnnnnnnnnnnnnnnnnnnnnnnnnnnnnnnnnnnnnnnnnnnnnnnnnnnnnnnnnnnnnnnnnnnnnnnnnnnnnnnnnnnnnnnnnnnnnnnnnnnnnnnnnnnnnnnnnnnnnnnnctgttctggctgccatttctctcagccacggtggggccttttccctcaggaactgtaagacccccgaaactggggagacctctgctcaagtcccgggatgagctggccggcaccccaataacttgagagaaaaccatacctgatgcaaactgcaagaggttttattgttagctagctgaggatgaactccttttgtcatgcagggcaggggaagtccgacctctagctagcgggaacagtagtgggcttttaactgctagctgaggagttgggaggagttgggaggagagttgggaggagtttggctacagctcttctattgggtgtccttggtacagggagccaaacaagtgcctggctaggtctctccacaatcattgcatttctggctgtaaggcacagaaacaaaaaggctttttgctggctgtagagaacgaagtgcttctttctggctgtatttttagagatcagggaaaacaagcttggggaacgtccaggggctttacctttcagggagaaacgctttaagtcgtggtctcacagaaccataggctcaactaagctcttcttcctattggttgctcctgacttggtgtttaatcacggcaacagaaaagtgactgctcttgcagaggacctgggctcagctgccagtgtagtgtcagggaaatgttagcggtacccccccccccaaaccagataggaacctatcagatgcaatcacagtacggcctttttatttgagctagcttggggctcctcagcacaggactgtcacacaggacagttttggcgatgcagagtcccgaatgtctatctgggcgaggggcagggctttatagtaagtagtaagcagggagcgagtgtgcaagcatctaattgggaagttactatggcctttaagataatttgctggtgctgggagtcatatcataaacttaacttctgctcccctctgcattggtggttattaggcagggggtgggcttgtaacctggggttacaggcttgttaggggagtaacctggagatgctggtcttgttggtggtgagcctagacacttaaggtaggtttgggttttgttggggggagggataacttggaaactaatgttaggtactggcttgttaatttacgtgagttcaaacaggttcaggttctctaaaatggagtttgtaaaagatttggcctctcagcagcacccagatggcagctcctaaccatctgtaactcaggttccaggggatccgacatctatgtcctggaactctccttgtagatcaggctggccttgaactcagaaatctgcctgtctcccgcctccatagtgctgggattaaaggtgtgcacaaccctgcctggcagcggttaccatggtactgaaggtcagacccagagcttggcttacgtttcatcagcctggacgacatgatggaactatatatagtctgatctcttggttccttaaattacctggccatccccttccctcgatttcatcatagtggtggtgctggtgggggcgctggagcaggagctaagaagctcggagtgtttaggtaattttgcagctgagccagctttacagtgggttctccctacagagaagactctccatcacagagacggatgatgaagcctgattgtcagggcactgatttacagtgagtctgggatggagcttgcttagcaggcagggactgtctcctccgttcagtcttcagcaccgcactctcaaacagattgcgacatctcctgctgcctggctagcagtgctgtctgctttcttggcattcctttccccaggatggctgcaaggtacaccctggagcctcttagggggcttttaaaatcccccaagcctagatcctagaacagggaaatgagttgggagcaggggaggcctctgtgttagtattctttttgttttatgttttaacttttttttttctttctgtatagccctggctatcctggaactcactctgtagaccaggctggcctcgaactcagaaatccgcctgcctctgcctaccaagtactgacgtcttatcttttatttttatttgcatctttcagtgtgtgcaagcatgtccaggggaagtatggcatgtatgagagatcagaggatgactggtgagaaccggatctctatttcctccatgtgggtcctgaggattgaactcagttcgtcagccttggctgcagatgcctttacaagctcagccacctcattggcccacatgttagtagttttcaaacctcctctgctggtctcagtgtgcatacggatgctctaggtgtatctatacgaggaagccaagttgtaatcagacaagcatgctgttacagtctgttttttttagtctgagcatactcataaatacctattctgtgccaaggcctgggatagagaaaagtagaagtcactacaatttggtggttataaaaaaaaaatgggcttcagagccaggccttggtgtcataaccaaaatcccagcacccaggaggccaagcagccagatctcggagttaaaaaggccagcttgatcgtggagttccaggacagagaaaagtctgtcttcaaaaccataaataaataaataaataagaatgaaagagcccagttcagatcctaaccctgcacttactggtgtgtgactcagtttccctccctccttttttttgtctaaaaaaaatcagcccctctctcacccctacatccaacccccacaaaatagctatagtatcatcgggtcaagaaaaaggtcattgcctttctcatggtcccttcaaaagcctccattcggaccctaggtgccttatttcctggcgttgctgtcttgattttttacacttgtctcttttgtgtgtgtgtgtaggtgcactgtgcacttatgtgcaggtgcccgcagaggccagaaaagatcatctgatcctttggaaccggaattacagggagttgtgaggggtttgaggtgggtgctgggaatcaagggaagatcccctggaagagtcgcagagccattgccccagcttttgccattgcgttagacaacactatttcgagctcgctctctagaatgcgtttcacggttacataatttagaaaagctattcctagtagtcatagagtgcagagagcctcactcagtgttagcaaatactacactcctttttcgagattgccccttcacaggtcagtttacaccctacccttgtgtgaatgtaaacagcgccgcctcttcacaaacaccttcccccacattgctaacgaggctgggcactttccacacactgatggccactgggttttctcattgagagaagggggcggtctagtgatcctggcttaaatttacttgaacatatctttgtggtgagacctcacgatcttgctgcggctcaacccaaaggtacaaggcaggcaggctggagtgggttccgattactcctctgcctcagctgtaccgcacagcttcctgattcccccccacgtaaccccggcgcctacgttaggcgtgggcgatggctcaattgagtgcattcctgcagagggctggagtttgtttcctagcatccttatctgaggcaggcagttcgggcagagctccccgcaggagctcggacagaaatggacagcgccgcagactccgcaggggaccccatctccaaacacagcatcctgccaaccgccaatttcaaacttcccagcccaaccccgcctggattcctttgccctctttctattggtcgctagtcaaaggaagagacaatgtgattggcttttccatttcacttcctctagccctccgagatctgggcgggtcctggtggagacccccgctgtccatcagtagatggcgagcgctgattggttgaggcacggccgagacctgcccacgtcgtttccttcaaacgttggggcgggagactcagggcggagcggagcggggcgaatgtaagccgggggtctgcggagtgtgagtccagtttgtgtgtgtgtctgttgggggattggagaggctctgggcggggggcagtcccctttcccaggtctccctggtcgaccccgttcatacagagcccactttcccacccaaggcctcaggatagcggggggagggggctcctgagggtctgctgcggctgcagcatgggtgtgctgggggtagcccggggtctgtgggtgcagccctgggggcgggacaatgggttcaacccagtgtctctggttcgtccttggggtgtcctgggggaagcctggggtctggggcaggagttgttgttagtgtctctgggtgtgctgccggaggacctcagggccccttaaagaggacccattcccctgtagaccagtctctgtcccctgcaagctttacctgcattcttgcccatggcgcttcccattttctgtgtgatcttatctccctcacttaatctctctgttcctgtgtcttcattctatgagctggactgaggccttgggtgggaaagtgggctctgtattctattccgtgcctaacccagcgcctccttcttgtgtctttctccctctctagcctatctggtcagtcaggcaaccgatcttcctcaggatcattgatctctgtannnnnnnnnnnnnnnnnnnncattgatctctgtaccctccaggggcagtgaaccttcctttccctgggataatcctcaaggctcactgatcaaaccctttgggcttggttcacaggttaggtctatgtagctacgcgacatcagatatttgtgttcgtcagggttttctaggggaaaagagctggtagaatggaaaagtggagatttattaggctgcagtctgctagtccaccaatggctggtagttcttttggaaatgatttatttccatcccttatgtgtatgagtacctttggccttcctgtgtctgtgccccatgtgccgtggaggctggtcgccacctcctcatcctgatctctttagggagacacgactctgccaagcccttcctgccttcaatgtcagtacccgcttgactttccccagtgttccttcggcgttggcggagagatgttgaagttcaagtatggtgtgcggaacccgccggaggccagtgcctccgagcccattgccagtcgggcctccaggctaaatctcttcttccaggtaagcagctgccagccagcgatgcacacccgtgtctgctgtggtagccgtctttggttgtattatggacagagactggtattcttagggtaatcctgtttgttcttttacatgtcctgcctgagctggactgaggtgccactgtgctgatgattacgtacgtggctggacgtgccccaggggagtcccctcatttctcatactccacactttttttttttaagatttatttattattatatgtaagtacactgtaactgatttaagacacaccagaagagggcatcagatctcattacaggtggttgctgggatttgaacttaggacctctggaagagcagtcagtgctcttacccgctgagccatctcgccagcccatactccacacttttaaacttttgcttctttcaatggaagaaaccaaaattgtctctagggtgtatttgtgtgtgtgcgcgcgcgcgtgtgtgcacgcacacgggcctgtctgtctgcatctgtcttgtgtctgggtacccagagaggctagaaactagctttggatcctttggatgtgggagctggtattacaggtgtttgtgagctgcctgtgtgggccttgggatccagattgtggtcccctgagccatctcttcagccccagtgtagaataatctaatttataatcttattccatacgagggatatctgttctctctctttttctttttttcttttcgagacaagtttttttctattacgtagctctggctgacctagcactcaatatgtagaccaggttggccttcaaatcacagagctccacctgtggctgcctcccaagtcctggggctaaaggcttgggccagcttccgcacctggcagctctcctgctctttagattaaacaccacgcctacattcctcattccgggcctaacagtttcgtcttctgtaaggaccaatgtcatgcaagtatttccagacagttttctagttcggttctactctgacttgccttcaccatggactgtaatttgtatactgaaattaacccttccccgcccagcttgcttttggtcatgatgttcctcacagctgtagaaaaccagccaggacatttcccttccatccctctttaatgtggagtgaccttagttggttttatattgcgataacagcacgccagagggtgtgtgcttttataaacaaaagaggtttccataggtgacagttctgctccctcaagtacaccaatggcttctacttggctctgctcggggactggttacaatgttgccacactggctaggggaaaatgcccagagatcacatgggccagataggaaataagagaccagacctttctaacacccgggctctcagctcctgaggttaaaaaaagcatttttgtttcttgaagaccaggttataaccccctacaatgtctcacccccaccttttaaagcgaccacagatttgacactggggtcaagcttgcagcacgtggaccccaggaggataaaccacatgcagatggtagcaatgggtgcctcctgcaagaggagatgggttgtgacaaagaatccaggtacaactcagcgtgccagccgagcctgctgtgctgctcccatgcagggctgtcaccctgcaggtcggatgcagtggctggcttgttttctgcttctgtgtgtcctttagactgggtctcagtcggtgtgtctctctcctactcaggacttgtattttggggcttggcagacttccagagccccagaaatctcacaaatcaccaggctttgccagttttttattttgctaagcaaggatgtagaaagcaaatgagagggggaaaaaaagctattaactttctggtcttttcatttccgaaagaaagggcattttgagaactatggagagctgaggcttttgagtgtgctatggggtgctccgagcctaagcttcctcgagtctctgggacccccccccgccccccgtctacttgggttaactctcaggtgaacagaggaggagatatgaggctcatcttccagcgttagaggcaaccaaaggggcaggctccgaggttcccaagcttgactgagccttgcggggaatttgttaaaatcggttttaagctgcgacccagaagagtttaattcaggaggttggtaatggggccagagaatctgttcttttgtgcttctctagtgattcacacgcagctgctcttttatgctgcccagtgttgtgtaacaagcccttgctgagacttaaaggagcagtggcttctcttcccagggctctgcagatcgagcccagtaggctcagaagcacacacctttaatcccagctcttgggaggcagaggcaggtggatctctgtgagttgaaggccagcctggtttatagagcaagttctaggacagtcagggctacaaaaaaacaaaaacaaaaaacccagagtccctgtcccaaacaagcaaacacacccacccccgaaggttggttgttccatagtgggtggctctgccagggttactgggtctatagtctgcagaaattacacctggggcagtagaatataggcactgactgctcacctaggcaccctgtttatttaaatttcttattattttttgtgtgctcacatgcttgtgtgactgtgggtgtgacttgggcatggtgcatgtgcgcatgttcgaatgtgcatgtgtgggcgtgccatggcacctgtggttatcaggtggcggctttcagcagtctggcatcctcccaccgcattttgaggcagggtctctcttgtttttgtccacgatatcttcctggacgactggcctaaagactttcagagatttcccagcctccacctctcattttgaattacagatatgcccccacatctagccttttctgtgggtcccaggcatcaaacccaggccatcgggcttctctgcaagtgctgggccagcactttttccagctgagctgttcccaagcccggccggctggggtgcctgccatgcttctatttatttaatcatttcctaggctacctgggggctctttttccttttccttttctttacaaataataaaagattttccattctgtgggtcatcagtagcagctattcatctttgccactgtagtacccagcggcccggagcgatatgtaaatgagtgggcgtggctgggttcggacagaactaattgtaattcaggcagcagtgggtcttgtttggctcaggggctgcagtatgtcaaacccttaacatggcctaacctgtgcatggcagctgccttcccatgaaggctgttcggctctactctgagccagcacagcaccatttaggtttctctctgccgtttaaagcgagtctcagggatggcatctgtgcttggagatgggcgtgtgagaaagagtctgccactcttttgaactcacaatcctcctgcctcagtctcccatgtgctagagttataggtatgtaccaccaagcctggctgcactgaaattttgtgtgtgtgtgtgtgtgtgtgtgtgtgtatgtgtgtgtgggtgggttgggggcagctgtagacaatggctctatttccttggttgatctccactgtaatcttttgagacaggatcgcctgctcactgaggttcatcagttcagctagatgaactggacagtgaacttcaggaatccacatcccatcccatcccccattgttggggtgatggacacttgcagctttgcctagatattttccggggcttttgaggatccgaactcaggtccttattcttgtgtgatgagcagttttccccagcccctgaagtcataaaaatttactttctgtgcctccctcctctagctgtttttacagagattttgcccacagtctactgtctcacgtgggaatcgttgctctaaacttggcttcccaactcaggtcttgagaggccggatggtggggcataaatgaatcaggctggccagacagaagacaggaagtcatgtctgcagtgacctttggcactcgccaagagggggacctcagctccagttatgtcttgatctagccaaacagagagcagtaatattgccagaacggctagagtttcaggaaaagagagacattctggtgtgtgtgtgtaaaatctactgatttaaaaatattggcagataattcaacttattttaaatgcttccagccaaacaaaacatgtttgtgggctagacacagtctgccaatctgtaaccgatccctcagatcatgaatacattcggcttcacggtaggcatccatttctacttcttgacatgaattaaagaggttcaagttgtatcagctgcccttcagccacacagggaaggaatgtcagttagtttcccatggtggatgcggtgccacctttgaactcgtagggtccacagttccaaaggttccgacaaagctcaggctcagcaaaggagcgacctgtttccaggggcggtgctctcagggtggtttttacttctccagatccaggcgagtaatcaccagcaacggagccacgcagataatcacttaacagccccaggatcggtgccagcgtgccggaagcagttaaaccgactcggtcgcttgtgatttactctgtgtggacgttattgatcagagcttttcattattgacagaatccccatctgctgtttgccgtttttttaggggaaaccgcccctcatgactcaacagcagatgtctgctctttcccgggaagggatgctagacgccctcttcgctctctttgaagagtgcagccaacccgccctgatgaagatgaagcacgtgagcagctttgtccggaagtgtaagtctgggccaaccctccccagagagcagctgttctcaacctgtgggtctccatccctttggggggtcagacagccctttctcaagggctgcgtatcacatatccttcttgtcagatacttacgttacggttcataacagtattgagatgacaactgtgtagtagcaatgaaacgattttgtggttggggggtcaccataacgtgaggaattgtgttaaagggcccacagcattaggaaggttgaaaactactgctgtagagaaagacaggatgctggaggcggaaagtggaaagcgttggttgtagttccagaaaccccatggtctgcataagactgacccaggggccctgcacagaatgtgcggttgtggtctggaggccagaattaagtgacactccaagtgacagaaactcagtcaaaaaaggaaacatgttaactcatgagacaaatccaaggatgcttccttcaggcatggctggttccaggaactcaaaaatgacggagatgctgtcctccgactctgtccctacactctgagctcaccggtcctgcaaggcagggcaggctcagtgcttaggcaccgttgtgttgaaattcaggataatttgtttctgttgcttaattttaaaatcatggaaatggatgaatacagtaatggttctgaatctgctgtctcctcttccctctcctcttccttcctctttccctccctccttcctttccttctcctcctccttctcctccctccctctcttttctctccttcctctcctcctgccttttcctccctctctccctcccttctcctctctcttctcctttctctccttcctctccttcctctcctccttctcctcccccctcttcctttctctgcctccttcatggtaagcgttgccaatgaactacacccctagctgagtgatttgttttatttatgctactgatggtttttctaaaatggagaagcaactggtgacagcaaagtgacccagggcctgtgaatgtcatgggtctactgactttgtctgccaacttagtattcctgagtttttgcttgattccaatgtggtggggcggttggatgctggtgccagatcttctcatatttcccactaccgttttcagccaatgggtgttccactccagcatctcttggagaaacactgaaaggccttttgggttgtcacggctaaggggcatgggagggtgttactgggtgagccggggtcctcttaccaagcatccaaagcacacaggaccatataatgagtcatgccagatttgagaaactgtctggtctaagatgagcatctaaccaagcactccaaactgtctgaggctgaaaaggatagttttgtatcccttcatcctgagtctgtggtttggtcacattcagctggggattcctctgctcagtgacacaggctgagatcatgagctccaggctctcttaagctggaatgttctagatggtttgctcagcatctgtagctacggctagatttttcattgcgatttttcagtctgtcagtctgtctctctggctctctgtctctcatgnnnnnnnnnnnnnnnnnnnnnnnnnnnnnnnnnnnnnnnnnnnnnnnnnnnnnnnnnnnnnnnnnnnnnnnnnnnnnnnnnnnnnnnnnnnnnnnnnnnnnnnnnnnnnnnnnnnnnnnnnnnnnnnnnnnnnnnnnnnnnnnnnnnnnnnnncccccccggcctaaactgtttcccacctgagcgatatgagctgtagctcagaagacagatgtccctcctcagtggcccaggagtgtccaagagtgctgaagtggaggctgctttgacggctttttattgagcctggaagacctctggctgttgtcagtcagctttctgttactgtaacaaaacccccaggataggtgccaggtgcaaagaggaaaggttagtctcgcccccttggggatttcagtctatggttggttgctttagggcctgtgattgggcaaggaatcatggcaagagggtgtggtgtctacctcagtgctaggaatgagcaggagaggagtcagggtctcactagcccttttcagaggctcacacactcttgggaacttcccacggggcctccctcttgctgggagggaggcttgtgctgcctgtgtgactgtgtggtctccatccaccagggcttgggagagttcagtcagagaagcaccacagaaactttcttctgggaggttcagtgcctctgtaataccgtgccagggctcgacctttatttagcacatgggcctctgcattctgcatgtaaagggtctgcacaggaagcagaaatgagtttgtgtctgagactggataccaccccctgcccagttagatgtattagcttagatgtgtttgcttttttgagataggatttcactgtgtagccctgactggcttagaactcactaagtagaccaggctggtcttgaactcacagagatccatctgcctctgcctgccctgccgggattaagcaggtgtatcactcagcccggtgctaggtggttagttttacacagtcccatggaaggttctgattggttctgctctgagtcactcatgggaggacattctgatcagccgcctctgaatcgacaaaggagtcagagcattgatcaccagagccgcctagagcagactaagcagcggactgtctctcagaggccccaggggtgctgagtaaccagaactgttgtgtcccttttcctcgtcgttgtgacagaatagctgacagaagcaggccgagaacagggctttgttttggctcacggtttgagagagctcgtggcagagaaggacagcagcagagagatgtgtcagcccccttgctaccgagtgctgaccaggaagccaagagcttgcgcagggagaggcggcgatgaaccccaaggctcaccctctagccacccccatccctgtcttcacctcctgaacgttccacagcctgtccaaacagtgccaccagctggggaccaaatgttcaagcacaggagcccgtgggggccatttctcatccaaaccatcagcaagggcttctcttgcttatttgcacctggtttgctctcagttccctcggctatgaaaagaggacgtgtgttgctaacggtgcccagaagtgcttcatgatggcgaaggattatcctcatggggttaattaagaaagggagactcactgtgactatatcacatcctgtagggagacccgccaactgtgatcataccatttccggaagggaggcccgcccaccacgattgtaccctttcctgtggggagacctgcccactatggttgcgtcacttcctggcctaggatcctggaccaataaaaaggagaaaattcactgttccctggtgtttcagtgtgggtgccctgtgaccagctgctggggaccctcctgctgtcttgattgtcgtcccgtgtcgtcgtcccccccccccccccactccatgacggactgcaccctgggcctgtatgccaacatgggcccactctcccttagttgcttccaggatgtttcatcacagcaacagaaaagttcccagggcaaccaggcttgtcaacagacaatacttgttaaccacaagcatcacccatgattaatcaatacagagtgcatctttaaaacgtccttgaggtatttactcagcatcctgcatgtgtttaaatatacctccatcttctgaatatgtaaatcatcaagtaggcagcgggagggggcagcacttggagggccactctccagcctctttgtcaggtttgagaccccagggatgcttccaagccgtcagttagaggaagctgtgtgtaatcaggtcctgtgtctgtggagtggagctcttctgggcgactcgttcacactttttcaagaggcttcctggagagaacccccgaagagctcgtgactggaatcgagctattgcgacgctgcgatctctacttccccagtcccacccccaccccgacgtgctttgagttgtgtttgggaatgtgagctttgcttttctgagaggaagagggtccatcggctgccactgcccacgcacgtttgtgggagtggaggattcctttgagctgccagaggaaatggacaaggacgactttgaagtgttgcctcccacagacgtacccctgtccttgagcccgcggagggcaggcgatgagcatctgggaacggaggagtaattattatcttcaccaacggcagtcctgccttgattgactatgggcacatgttctggttgtgtcattcgatgattttgtggttgtgtggccatcacaggatccgtacaccaaccaggtggcataggccagtcactttacttagctgctatttctctctctctctctctgaaatgaggtcttattatctagtcctggctgtcctggaactcattatttagataaggctggccttgaattcagagatccacctgcctcgtgtttcccaagtgctccccaagtgctcgcattacagacgtgcaccacaccttgcctatgaattctctcttggggctggagagaccgcgcaggagtgacaagcatttgcttctattagagaggacctgggtttgcttcccaacttctcacgacagcttgtaacttctgtaactccagttaaggggacctggtacactcttgtataaaacacatgcttatgtaatttatataataccttaaattttaagtgacacacatatatgtgtacatatatgtatatatgagagatactgtggtatttcaacacctgattatctatctatctaattcatttatttattaaagagttatttttctgggtgtggtggcacatgtctcaaaaaaaaaaaaacaacccaaacaaaaccaaaacacactgtttatttttaaaatatttatttatttatttatttatttatttttttgtaatttttttttaaagatttatttattgattataggtaagtacactatagctgtcttcagacactccagaagagggagtcagatctctttacggatggttgtaagccaccatgtggttgctgggatttgaactctggaccttcggaaaagcagtcgggtgctcttacccactgagccatcttaccagccctttaaaatatttataaagcatgtgacatgtttgccacttattttgtttctttagtttttaaaggatttgatatgtacatttgtgttatcggtatctgtatgtgcactgcacaggcttgagctcaggtcagcctgtcacctcgtcctctgttaacctagcatgacactcatggagctgacacttgtcaggtacctgatacacagcagccggcgtttcagacagtccagacacaaggatgcagttgagcatgatacgtcagtgctcagagacaacagacaatgatgtgatagcggtccaacaggagctgacccgcctccgtccctgaggccaccctgccccacacgttccagacaggtttctgacagcgctgttctaaagaaacctactgtgctgcaggccccacgagggcatcccatccacagttagttatacttgctcaccgccaaacagtggcaataagtaactaccctgctgtttaacgtgctcgccatctgagcgtaggactactcatttagacaagtataagagagtgtgccaatcccctcccacagcagcctcagacacgtctctgaagtcaggaggctgccctgatagtattctgaccgtggataggacaaagaaagcataaatgctcaacgaggcaggagagcttgttatccagacctaactgttacacagtagacgtaagcaggtgtcgggctggcaagatggctcagcagtcaagaggacctgagttcagttcccagcacccacacggagattcacaaccagtgtagcttccagttcgaggtgatccaacgtcgtcttctggcttccaaggacactgcatgcacatgatacatgcagacaacacacacacacacgagatatatgattttttttttttttttttgagacagggcctttgtagccttggctgacctgaggctccggtttctgtgggttgatctttagattgtttagattggcgctcatggaggcttaggggcagtcaggtgtcttctgcattttttccttttccattctcttcgtgagtctcttcatgtgcatctcatccccagtgtgtgttctgtgaaggatggagtcctagtctttggaaggctggacggagtttcagggaaggaagctgtcaattgactctacctggttagctctggctgccctctctctcctgcaggcctagtcggctgtgtaatgaagccacaagctgggctgggtttttgtcatagcaccccatgttgttcggtctgcctcagtattcactacgtactgggacctgtaagcaccaaccaaatgttagcagagttggcgcctccatatggttttggggtcacagaagcggctggtgtggggagaggttgtgaagggctccccaccccgtttctctcttttaaaatagccttgatttttagcatctcacttgttcaccttaataatgcagaaagcctttgggggaaaagttagagatttagaatgcttccctgcagttccgaacgtgtcacagttttcgcccacaaagcagtttgtctgacgtgtgtgatttagatgcctgcttgtccccagcgatgggccctggagttactgaattggggcaacactgtaagcagttttagagcccaaagacctgagaggaaatgaagagagattggcccgtgtacagccaagggaaagtcaggttcaactcagaaatctgcaagccagtgcgtttggctaattgtaattcagcactcaaacacttggcatgaagagaagcccagaaaggaacagaaacagagggcagactctgtctgggctcaccgtggcggtgccccttgtgggtcttggcatcccactgagccatctccaccatcctacatccacttttaaacagtgcccacagtaaatgcatatagatccacacacccctctagcttggtccccagggcatccaggggactttggtatgactggtcaccacgagactggaggtcagaggactgggatcatcggttataggcacatcccaccatgcatggccttttatgtgggtgctggagatttgaactcaggtcctcatttgtagagcaaatgttctaattcacagaaccatccccccaggccaggcctggtctttttagctttcagtgtgaatgggattcttctggtgagcttgtgtgcctgacaaccctgctgaggagatgtcatggctctctgggcctccgggctaaccctgtacctctctcaaacatggccacaaactaaggccaggaaagaaatcctctcaaaccgcagaagggccagtggcataaacagaggcagggcacagctagctaggaccaaatgatcctgaatcagctccacagctgacagaagaactgggggtcaggttgcttctgttacattgtaacgcccttaggaatgccgccaagcttgtttgaccccagcactgccctgcagccagcagccctctgaggaagaagggaagcagggcggtgtgctgccttcctattttctgagtctacaggactcaaattctagctaccatggaaaccgcactttggaatttctggagcccttaattttaacagataaaaaacactttggtgccgattttataattgttcacgatagatgagaagtgactgaaacgtcttctgaaggggaaggaagacagaacacatttctcttttctcccccccactcttgcaagatgtgtgcctctgaagtgtgtcttttcactctgggtgtgactccttccgtctcccacagattccgacaccatagccgagttgcgggagctgcagccgtcggcgagagacttcgaagttcgaagccttgtgggctgtggtcacttcgctgaagtgcaggtggttagagagaaggcgaccggggacgtctatgccatgaaaatcatgaagaagaaggctttgctggcccaggaacaggtaggagggttcgaatctcaggtctggcctctgtttgtaccaagtgtccatcacagggacaataagctgctaatttgatgtctaggatctagcgagttgttaacaatgagtgcatgagccagaaaggcctctcctgtctttagctcctcctccacctgatgctgatgaattctgaagcctcagaaattcccatccattcctttgtcatgactctgaggctgcatttaattttagagccaagttgggcttttaaactaaaactggtgactttaacatgaccccctcttgactgtaagcttgggtcttagggccgagcctcacgacggggtcaatcgggcagtagctgcacccatgcatgcttaggtgttctattgtgggcacaggcctttgcagaaatccaagtaaaattgtgttccctggcttgtgagtcgcctgtctgaggacgggttacgacgttatccttttagctctagttttttcttcctttgaagacaggctgctctctccagacgtattgattcattggctgtgttttcaagagacagctgtcagccttggagtccagagagaaaccatgagttacaagccttctagtgcacactgtgaggctgataacacgcccagctctgtgggaagcccgcagaaggcactggagtcccctgtggctgttcctcgcagggttaaaccgcagcccccagaggcggagaggaaccgcaactctataaagcaggcactcgcctgttaagctccacagagtgggagagaattagcagcttcattagcagtgatgaaggacgatgtcgtgggtgagccaagggcagtcgggaaagtccttaggacaagagggaatggaggcagggcagagaagacatgggagctgccgggtagacacatggccagggtcacgctctgggggtgtgaggtctggggttctgttcaggggtgtgtgtgtgtgtgtatcagtctgtgcatctgtgtgtgtctgtgtgcatgtatgcatgtgttctgtgtgtgcatgtatgtgtaagagacagggagtgagagagcgagagagagagagagagagagagagagagagagagagagagggagggagggagggagggagggagagagaggagatggggaggggaggggagagaaaggagtttggtggctgagaattaactgagaaatgaagacatttggatgggcactgaggggaaatctttttttttttttaaaggtttatttatttattatatgtaagtacactgtagctgtcttcagacacatcagaagagggcatcagattttgttacagatggttgtgagccaccatgtggttgctgggatttgaactcgggatctttggaagagcagtcggcgctcttaaccactgagtcatctcgccagcccttgaggggaaatcttaacaactgtagttttttgtcttgttaaactacaagatgtaacatgtgccacatcagccatttttaccgtaggactcagtggccttaagagcccccctccccacctcccccgccgccccctttgctgtcaaccagttccgcccatgacaggtcctgagagaaatcaacttaggggggaagatgctttgctttggcttacggtgtcagagttttcactccatgggcagctgccttcctgacttcaggcctgcagtgaggcaatgccatggtagagagcctgtggtcatggagaagagttaagggatggagaggaagtagggtaggggagtggccctgggacaagacagccctttccagggcaagcccatcagtaacctctcttcaactgtgcccgcctcctacagccctacatgtcccagtagcccatacgccattaatccacaaatgaaatcaccccttgatgatgtcatagtctctgttagccagtcctttccctagggcccccatctctgaatcaccatgtcaggaaccaagcttttgggacaccagcgtttgggggggacatttcagatccaaagcataatgcccctaaacaaaatcccaagatccccccgcttgccagagtccaagcatgatattatcttcttgaatgacgcatgagcaacattgaagtgaggggaaatgactagacactgcctgggattaggaggccaggatgggatgtgcccactcagcttccctacccagggaagtgctgtctgtcttccatactctcactaagtgtgctcgggctctgcatgattctgggtcttcgagcacgaggctagcccaatcttgcggggcttgtgtttggtcaggaactagtgcatacaagatgaagccaatccaaccaatgtgccacaggtgggcaggcaactgagagccaaacagatgcactttcctccaggaaaaggacctccagcaaccatggtgcggaggtgtgggcctgggtctttaagaaccctattcacgtaggagctaacaaaactatctattgttggtaaatatgccatcgatggagagagtcaatatagtaaagaaaggcaggctccccaatggagtcaccagacaccatgaggattcggcatttaaggatatgaagagagaagggcagcatgggaaaactgaagaagttgtcagagaggacatgaagaagtggcgtcctcatcacacgggacaggccagagtgctaggacagccagaaatgctcctcagagacctgttactgtcaaaggaccttcaggggccaggcagagtcaagtgaggctgggacctgtttagatccagctcttcaaccaaccgccgccttccctgtgccagcaaaaaagatcagccctctagcatgtttgctaagcagcttagcgctggggtctccagggtgacacttgggactagctacttaacaaaaaaagcttcagagctcaggaggccacaacgcttgtctcgcatgcgtgaagtcctgtatttagtcccctgcaccgactgcataaactgggcgtggtagcacatgggtcagcactcaggacataaaggctcaggcagaggccagaggagggtggtgtcctgctctgtcatgtcccaccaccatcccttgagtcagggtctctcactgactctggagtgagactggcactcagtcatcctgctgtctctctcctgtggtgttggggtttggagcacccgggtgcgcccagcccttttagatttacttatttatttgctatgtgggctaggacgccaactgaggtcccaccccgcacatcctgtggtagcccagcctgcctggctgccacacctgctggccgctctcctcaccctgatcaggccgggcactggcggcactctgcctcgcctacctggcctggacccaaggcacctgttagaaccgtctaggaagtgaaggtactcaaaaaaagtgacctgaggagagatgttaaggatgcaactgggggctaacgtgagggcctggcaaagctgagccaagtaggttagtagcaaaatttcagagtgacatgctaagcgatttttaatatccagagaaatcagtttagattgaaaggtgggacaatggccatttccccctcacagttccatcacaattgtctaaagagtttttcccccctccccccactccaggtttcatttttcgaggaggagaggaacatattatctcggagcacgagtccttggatcccccagttacagtacgcctttcaggacaaaaataacctttacctggtgagtcttcgtggctgtccacgtgcaacatttccgaggctccgatactcagatgccatggactgggaatgattcttgcctgtgtagcccatgacatctctctctcattcagtcgattttctaatcaaacgtctccgttccctgttctaatgattaagagctgacccacttagaagaggcccactgtactcgggcacagagcgaagcagcgagaagccatttaactgggaatggtctctaactacctttaatagaatcttgctttaattaaattaattaatttagttcccgagacaggggctcattatttagatctggccggcctggaatttgctctatagcccaagctggcctggaactcagagcatcagtcacctgcctgtccagtgctgggatgaaaggtgttcttgtcttactttaatttttaaaagtgaaggtaataacgcgtgattgatgttagaaaatccctcctcacacgtgtggaagctggacgggtttatctcctagaagcagagaataggatggcggttgcctggttacctgggtgaagagaggcagggagggatagctaatgggtagaccagttagattaccatgagtggatagggaagagggatatgttttggtgtcttacagtagggcaattatctcgaaatggtatgtatgcctcacaatagcaagaaagggttgaatggtcccaggacgaagcagatggtaaatggttaacatggcgaatttgttcattgttgtgatttgatcattgtacattgtatatatttattgaaatatcatgctgtaccccatggctacacactagtccttcaagtataaattaaaaactccaaatcccaccctccgaatgcatatattgggccagtagggtggtcccacgggtgggctgcttgctaagaagcctgaagacctgagttcgattcctgggacccacaagatggaaagagaactgactcttgcatgttgtgtcctctgatgtgcgcatgcatacacacacacacacacacacacacacacagacacacacagacatgtactttaataagtttaaacatgtatccactgaggatgtgcaaggagagccaccgtcctctgctttctttgcttctctctggaggacgcacacactagtggaggtgtctgctctttctgaccttacccatgtcttagtaggggagaaatcgaacacactgctggatatgcaaccaaagtgctttcttttcaagtgtggtggtgcacatctttaaccccagcactcaggaggcagaggctggcagatctctgagttcccggccaatcggggcctcatagcgggacccatctcagacaacgttgacatcattatacactgccgttctccatcgttttgggggtcaggcatcgaggctgggacctggagcatgctaagcaccagtgttatttactgagctgcgaccctggcctcccaggtagcccttaggacggtggcagggttttctctgatgtccatgtagcgtagcttaaggaatcccaaagctctttttgcggggccctttttagcttcttggaagattaagttcttcaatgtgaaacatattctagaaacaacatttgttcctggtttggcttctcgagcgaggctctcgtgtcaccttgggtgaggatgaggaggttcgtggcggggaacaaggagatattttttgttttgaacagccactggccatttatttttttaatgatgttacctcctttatttctgatctggaagaattagtctatttatcttagttccatatgaattgaagtctctcccttgctccacccagccctctttgggatatggtggtttgaggtaaggtcttcttatgtctccaggccgacatgcaatgcaaggatcccctagctggggttgcaggcatgcaccactatgtgtagatctttgagctttctcgtgggcatgttcgcgttcgcactcacgcgtgtgcgtgcgtgtgcgtgtgtgctcttgatatgccagaggccagagcctgggtatctaccctgatcactccccattggatttagttcttatcttatgtagtcctggctgtggagctctctgtgtagagcaggccggccttaaattcgcagagagccacttggttctgcctgccgagtgctgacgttaaaggcacgcaccaccacatccggctccactgcgttttcaggtttcatcctcacccagcccgtttgcttcttgtaagataggatctctccttggcctgaagctcgccaactagattaggctagctggtttaaaaaaaaaaatcccatttgcagtgatatcccattcaccatggctcgccatttttctggtgcactgcagagatagcacagttcttgcctgtctctggccccatctatcaaggctaggctgcgactctggcaggtgtcccgtggaagcggctctttgttgatcgtaccactagcttttctgttccataagcaaattcactagagggaaactagttaaaggcctacagagtctcattccgtcatgacagggaggggtgtggtcaggaagggcagctcttcatggctgccagagagagaaagagagagagagagagagagagagagagagagagagagagagagagagagaacacctttaccccgacctgcctccttgctggctctcgtcgggaccctcggtttgtaggatgctgaagcttacactcaaggttggtctcttccctgctgcgttaactctcccggagactgtcctcaggtccatccacattttgttgtatggtttcccaggcacctccctgtccaatcaggtcggcagatatgtctgatgatctcactagaagagtggaagggtgaatttaggggggcagttagtggtccccgtaggggaatagctaagggcttgaagccaggctcctggctcccgtcacctctgacttcccgctcctggtgctataatacagtggtatccagaacagctcctgatagcagcctgctttggttgtgctgtgtgaggggagtttttcagtcttccagttttcaacacacacacccgtgcgattttgtggacagtgtttccttttcatgtaggaatgggttggaaatggcctgttttggagggccactgaccccaggacatttgtggacaccggcatctgtcaccatcctgagtcaggagggagttaatgaacacagagccattgtttgtgctagtaccaagtgacagcttatgatagttttgacaactagacatgtgctgttttgatctcttggctaggattatctgaatttcaaggcgtgcctcaaaaaatcattaggcatgtgtttccgggcctcctctctggaagccagggttgaggaggccgctgccgtcaggaaacccggagtttaaaaggcctgtgcttgttttgttgccgttccttgtttggacttcccagagacgtccttctcagctggaatttcctctttggtagataagatagtaactcctctttttgggccccagttcaattgcttgagcgagctgctgccattggggttctttgggtttgaaagagttgttctatgtccagcacgtgggctgtatttcaagagagcgcgttcagagtcttgtcctttttaggagccacagtttgatctcgtggcctcggttctctaagcctccaatttgggaggtctcactgtgctgccgccgccggttcaggcacgcgcgtctctgtgaagtgttgtcttaccgtcacaggccctgtgggctctgatcattgcttcttcctttgtctttgcggtaccagagcgtgcacatctgaaatcactcctggggctcaggaacaggcggtttctttgtgctgtgagccaaggggcagtccatggtcctatgttcctttcctttgctcccccaaacctgccagtgcctttccttaccgcacgtcccgggttacttggttgagtgcactgcttcttgtccacactgtgagtctatgctctccaaggactttttctttttaaaaatgcctgaatcagcctggaactcagaggtgcagagatagaaggccttctcccatctcctagacagtggctcttacccttcctaatgctgtgaccctttaacacagttccccatattgtggtgacccccaaccataaaattattccatcactactccataaatgtaactttgctactgttatgaatcataatgtaaaaatatttgatttgcaggatatctgatatgtgacccccaaagagttgtgacccccccccccccccaggttgagaaccggtgtcctagaggttcccttgacctttcagacaatagcataaggtctctctctgtcaaggacgctttgcttagaggattccaaccgtctgctccattccaggggtcagaagcactgggcagagcgcagtgtgatgcccagggctccattgcattttgtgtggcacacattgagtgtgcaagcttttcagggtgtctttcctgagaggcagcctgcacagcatccctttgctgatgctgtggtccagcaaccctgaataaaatttgtcttatttcccccaccaaagctagaacaaaatccgagacagggcagtctgtgaggagagatgcttatgtggctcacgaccctaagagcatgtcactaacatcaggctggggcctggtcacagttttcttgcctcatgataacatggtaaagagtgccacgtgctaagatagcatttgaggtctgggtctctccttaaagagccactaatgctatcacccccccacacacacacacatacacatccacacacatccacaccacatctttacctaacctcccagaggccacatctccaaatagcatcgtcatagaaatttggggttaaatagccaatgtgtggacatcttttatccctatgtgtgtgtatgtgggcatacatgtatgtggtcattatgtatgcagaggtgtacatgtgtgtggaggtccaagggtgatgttgggagctttcccgatcactccacactttgttcactggggcagtctttcactggaacccagagtttgacaggctcccttgtggatcccttgcctctgccttccaaatgccaaatacaggaaggctctgccacgcccatccagtgtttacatgggttacagccatccaaacttgtggtcctcacgcgtccagcaagcactttgcccgctgagccatctcctcagcctcattatgtgaattgggtgtgtgtgtgtgtgtgtgtgtgtgtgtgtgtgtgtgtgtgtgctgtgcctatcatgacatgcttgtagaggtcagttctctccttccaccttgtggattccagggagtgaactcagggcctgagactgggtaccaagtgccctttcctgatgagctagctcccaaccctagcatgtgaacttttgaggacatgtcgagagcacagcaatactagttaactatgaatgttcatcccgcctccccgccatgcacccacatgcacacagatgtgtgcacaaacacacacctgcccttcattttgactttagcacaacgaatggaaactgccactctagtccttggagtatagatgcagagcccagcagtggggcttcggctccttccaaactgaacacatgtaagctctgccctttaattagcatttgcagctgccgctgtagaaggggtctgtctctgttggccagaaagtctttgctttgaaagagcgagtccttcacagctccaagccttgctcggctgtcggctgctgtgcggtctccgccatcagcggggctgccactttgtttaggcctatttcacccgagggctcttttctcccatctcatttccctggtctttgatcgctgtgatttggtgacttccccgtttgtatgccccgtccatgcccattctctgtgtagacttctctccggtccttgcaagggtggacggtgaccgtttccgtgccaacaggcctggttattttccagccctttcgtgtccgagatcttgtcttgatattcagaaagactccgggtagtcactgaaaacaaatgtgagcagaagtgatggctgtgttagagccaaggtctctcaagggcagtatgctgtggaaactctgactaggaagggattaggaaacggaattggttctgcagcctcatcaataatggtttcggagcagtgctgggtgagtggcgttggatccagtccttaaaaatgcgtcttccaggccggcgggatggctcaacccgaaaaggtcctgccgtcctcatgacctgaggttgatccctgggaatcaagtaaagtggggaggagagaactgactgcacagagctgactctgacctctgacctctgacctgtatgcataccccgccccccactccgcccccagtaataacaagttaagtagtgaatagtttgggaaggtacatttctcaattggattcaggagtccgaggcaggaagattgcaagtgtgaggccaagagtgagaccctgcctcagacagtgcagctccgtgagcaccgatgccagcgttcactcgctctctgagcggttggaatgaacaggagaaatattttcacaccctgatgcttcttattgcccttagagtaatcaggagttctctccatgcagccctggtcatctcggaactctcctctagaccaggctggtctcaaactcattgagatccgcctgcctctgcctcccgagggctgggatcagaggcgcgcgccacctctgcccagcagttatttagttcttttgcattctgctgagtgccatttttataaagacataggaattttttttaaaccatttccattcctgatatttaggacactagcacatactagactttcaaatattatggatgaaaatgtcttatttaaaaaagaagaacacagcacacgtacttacctgtgaacgtgtacacacactctgacacatttgtggatgttggaggacaaccagcaaaagtcagttttctaccgtgtgggtctcagggaccaatctcaggttgtatggacttggtggcgagtgtcttcacctgttgagccatctatctgtcccagctcacattttttttttttttttttttttttttacaaagcattcctcccgtgacctgatgggcaagcaggtttggaaaaccccctgtagaggacgtagagcctgcttgggttagaagccacactttggtggtagtgggcagatccgtgccatctctacaaagatgagcagcaaaagctggggaccaaaccagacactgcacgtaaattctagcacatcgtaggtggcgactctgttcttcgttagtttataatggtctctgggtcacagcccatcttgaagcctctcggtctgtgatgtttgatgaggactttagcagcatggtaactggttaaacctggcttgcatttcacacaccctgcctcccccaagagctccgtggattccaaatgagacctttatcctgtagtgtcgttatgggccgtggataatgtctcgatcctcaaagtgacttaggggaggtccagagtagttctgtctgatgttgtacacttggggattttagtatgctaattggagattgtgttggttcttggggtttgattaggctctctgataaagatccatccctttcagatgtttgtcatttagggtgtctattttggcctcgtgtcacagagtgtcaggctagcagctgttgtaattttggtggcttgttttctcaatcagtcccggcttctgaaggcaggggaggttgtttgaccctcagaaatgacgaatctagtttggatgggtatcttgcaaagaagagcagcgaacctgtgcattttctcctttgtaagagatgctggttttctggaaattcctgccgggtctaccaaatagaatcttcaggaactgacgctaaatactaaatagtggtcggcgtgtgagctcaccagagttgccgatagttgctatagttttgactttctcaggcttaaacttagaagccattctggttctcacataacagagcctgaagttctgtagcagggtactacgtcatcacagatatgcattgttcttatttaaaaccatctgcattcctaaagtactggtgtgtctgctattatctgtgaattcccctttgctgcttccgaccctcttaatggcagtatatatttaaagcagactcagaaattagcattcacccacatccccatgcctggagagagccaggttgggatgagtgggtgcgctgtagcaagccaggtggctcctgtggggctgaggtgaggcgctgacgtcactgccgtcggctgtgatttggagaaaacagtcttacccctcctgggtgtcacacttcttgcctgtgagccactttgcatttagcatctgtggtacgaaatggcatcttgccttcccagggtggttgtcctgtgtgcgcacagtgaaagaagccacgtgagcaggtcggttcccatgctatgagaggctgtgcaagtccctggctttgccagggtatctgggtatccggctaccttcagtctacagcccaggcccacctgcttcaggatagtaccacccaacgtgagctgggagataagagcgtgcccaccagccatgggtggggcatgataggagtggtccctcagttgagggtcctgcctcccaggtgttggcaaccatgggtagccatcacacttgcctagagttgtgtcctgagagtccaggaaaggcaaccttgggaggagaacagaattcataccccgggctccgtagatgttgttgctgtgtgtccacggccaggaatccagagagaaatgaaggcgctcacagcccaggaccccagcccccagagtgggatgcccacgtctagggcaggtcagtcgttcccgtccagaccctcacagctacccctcccgcaggtgtgtttctatggtgatcctaagtgcaatcaggttgactgaaggagagcatcagtatggatttagtgtctcccgacaggcatgcattgaaacgtgtcctttcttgagaggaccggacacaagctgatgctggccaacacagtggacattagagtaaaggtcagagagctccaggagaactgcagcacggtcaagtgggtcctagctcctccgcagccagaaacaaagcacagagtgtggaggggaaggaggactggctctcacgttggttccaggcaccaagccatgctctttcaggctctttcccaatcttcacacagtgcagcaaagggattagtcttatctggagttctcagagcccgaccatgagaggtcgaggcatgaggtcaccaggtgagtcagaccaagctaaccagcctccaggtcatgtgtggactcaggaacgcctcacccgattcacaaaaatagaaaagacagagggccgaggatttagctcagtgcgttaaaaagtgctcgccgtgcagttgtgacgggttcagctcaaagcctgagcatccgtgcaaagccagatgcggtgtgagcatcagcaggcccaggtgtggtgtgagtatcagcaggcccagggctccttcagggaggcaggaagctgaagcaggaggatatctggaagccggagggccagctcatctggctttgtagtgagtgacaaaccatgaagacaccctgacaggattggaatcaagggctgactgacacctgtcgtcctctgacattcacctgtgtgtcacggcgggtgtgtgcctacattcacacaggtacaaatgcttgtgtgtgcatattttacacacacacacacacacacacacacacacacacacacacaggtgtgctcatattcacattgacggttttcacttccttggggtggagttttcttttctaaccaagaattttagctgagaggtgtgtgtgtgtgtgtatgtatatatatatatatatattctgatttatttcttacatatgccaacaaattaatttttcttctgattaaaaatggagttttttttttttttttttttttttttttttatcctgtgcagaatgtcactttctgtgatgtggtcagctttccactggagcgtgaatagcctgagtcatgtgtctttaatatctgagccatcgcccatgatttacaggagtcaaaactctccggtgtcttatgggtggggatttggatggtttccaagtctatttccttgttataaaccattcagtagagagtctatttacttatctatctcttacctgtgcactgtaagcaccaataacgtcaattgttcagagtggaagagccaggctggagggtctatattcactattacatttttaataagagatcatcagctgtcttctgccctgagtgtaaaagggaaagatcgtattgcatttaccacacatctccagtattctgctcgggcccgaggggaatgtgaaatgactgttagcgagtttgttgccctctaggaatatccatctatgcagcatgcccgatctgagggagagggtgtctggggtgtcgacttgggcgggtgtcagaggagaaggatcttcttcggcttctcaggtctgtcttgcgagcatcctgcagggtggtgtctgtgggtgctctctccgttctctggggtcacggatgtggtttctgtagagcagaggccttaccctgtgtctgaggatccgtctcgcacatggacattgcctcgcagaggggttgtgattacatcgtccgatgttgtttgagggcctaatggaggtattccctatttggggtgtgggaaaaaaaaaaaagaatgactttgcccctctctctgcaggtcatggaatatcagcctggaggggatttgctgtcgcttctgaacagatacgaggaccaattagatgagagcatgatccagttttaccttgctgagctgattttggctgtccacagcgtgcaccagatgggatatgtgcatcggtaagtgaggctcccaggactgtaccgaggacttttctgaatcctgtccaagctcctgcatagacagcttcatctagttttagccaccctgtgattggctgacaactctccaaaatggccggcatcttagcacatccattcgaacatagatctgactgtcagatggagccaggtaggcacaggaaccccttttatgggccccttggtaggaagactgagagatggggagagggaccggctcctatcctgggagcagaaggtgggaactaacaaaacagctgcagccctgcctcactggaccaaggactcgattgagaaagggccgttctggatcaccgatgtgcaggtttcgctgagtctgtttttcctgttgctttgggcatatagcagaagcctgtgttagatcaatgacacccaccctgtggctgagacacagattcaggaggagccggtcctgcagatgattcgaatccgaaatttcccttcaaggctccagtacgttggttgcctgccatggcgcttgacgtggggtcatgaggaccctgacttcattaatgggttaatgaactgagggagtcatacttcggtgtaactttgggattttccgcccgagttccccaaaataatgactctgagacttcttatctatggataaatgtgtagcccaatagctttgacttgttcccgctagctcgtaactcagttatcctgtttaaactaggctaaggcatgccacgtggtgagttacctctcctaggttcacatgtctgtctgcatcattgttggggcaaatctctcacacctgactatttcccagaatcctatgtatctcccctggatgtcccaccttccagtcttgctttagctcattggccgaaggctttgtattggcaggtgatgcttccacacagtacataaagcttctttctacattttggtgttgtgggggagttctggcagctggaacatggggctggctgaagaggtgaatccccagagggtgcctttgaaatgtatatcttgtccctggtctctggccactctgttttctgttcaccacaaagtgagctgctttgctaggtaacactcctgatgccatgatcttctacctgcatcaggttcaaagcagcaatggccacctgctggacttgaacctctgcagcagggcataaaggcaaagacttttctcattcattgatgacaagtgtgtaaagcacaaggcaggtcccggggacctgatggttccccactgcgtgtcaccttttacaggatccaccattaccttgttatgtcacgctggtgtccaagcctgtaacatgtgggcatttggaaaggagggcatacatacatgcatatgtgcatacacacacacacagagcagggatacagaatatgggacaaagatttttccagttgtgaaccacatgaccttgggtccttgggcaagttctttggcttttttggtcttcatttttttaaagagttatttacttattatatgtgagcacactgtagctgtcttcagatgcaccagaagagggtgtcagatttcattatggacggttgtgagccaccatgtggttgctgggatttgaactcaggaccttacgagaggtcagtgctcttaacctctgagccatctctccagcccccttggtctttgttttttgccatgtagaaacttgagcctccagtagaaataattcacctgataatatctcatctgctttctttttctccctcccttttaagaagttaaatttagttttccagacgagttggcatagcataagacacatgccgaggcctctggctgccgtgaggcccgggctgcgtagctggcagctggctgacacaaacacagtgctaatctaaggctgtgaccttctcacagagacatcaagcccgagaacatcctcatcgaccggacgggacacatcaagctggtggattttggatcagccgctaagatgaattcaaataaggtgattaggaagtggaatgagctggctcaggggtgatgtacggtaaagagcgttctgtggtcctcctggatctggcaggtgttaggacaccatggtgagcagcatttgggagcctcatctgccagggtttgactcttctgggcggtggggctggagggtgggggctcagggatgtctcccagatggcgctgcccttatgttaacacctgttagcaccctgccaactctctgggtattcttaccttttccttaaaaagaaaggaaagtgtccattttattttcccttaccttatagagaccgtgttctgttgcatcgccttgctttatttgaaagtattttgatgaaacatgaccttctttttcttaagtgctctccacatgcagcaaaattgaaattagtcactagcactagagacttggaattaaacatcctgaggtgtcaagatgctgatgttcaaaagtatcgttttcgctgggcattggtggcacatgcctttaatcccagcactcaggaggcagaggcaggtggatttctgagttcaaggccagcctgatctacagagtcagttctaggacagccaaggacagccagggacaggacagctacacagagaaaccctgtctggagaagaaaaaaaaaagtatcgttttcaagtcttgggcctttgaaaaagttaagtcatgttgcacatgttgctaacagagagccaggggaggaccaaccaagatcaggatggaggctgctttcaaggaagatgacaaagtcaaaaagacaaagggttaagaatcctctaataaaattggctcctactgaaatgtgaattcggggttagcagcgtaggaaggacaggtctgagggaagcgcttccttcggctttgagtctgagccgctcagtgactggagcaaatcctctctctggaagccgtaggttctacttaaaatgcataaaaccagaggccgcctccaggtctgagacttaagtcctttctctgaaggacaatatgtaaaattactttttcgtcccccgactcctctggggaatggtggatattattaggttgatattaggaaaaggctcagggctgtgttagctctgtgcactttggaatctggcctgtgtgttctgccgctctgagaactttctgaggtaacttactcagtgttcggctgcaggaaaccaggaggaccccccccccccaacacacacacagtccaaatccagcattactttcttttttattttaaggttctatcctttaaaaaaaaagatttattattaatttaattattgggttttgagacaggatttctttgtatagccctgactgtcctggaactatagaagaccaggctggcctcgaactcacaaatccccctgcctctgcctcccgagttctgagatttaaggcgtgtactagcactgcccagccttattattttatttatttatttatttatttatttatttattatttgtgtgtgtgtgtgtgtgtgtgtgtgtgtgtgagtgagagagagagagagagagagagagagagagagaatatgtgccacacgcgcacatgcctgagacagccagaagagggcatcagacagatgcccctgaagctgaagttgcagggtggggagaagctgcctggccccccaagtgctggggctcaaagctgggtcccctcgagcagcaggaaatgttcacagttgagctgtccttccagcctcccaggttatcttcctcttatttatgtattcatattaagaatgatgtcatcgggggctggtgagacgagtcatagcgttaaggctcccgctgtcaatcctgaccagcccagttccatctccggcccgcatggtagaaggaagaaaactcaactcacctccacatactgtcctcggaccccatgtgtgcatggtggtaccttcacacacacacacacacacacacacacacacacacacacacacacacacacagagagagagagagagagagaaagagagactaaatgaatagataaaatacagaaaaaaatttaaaaaattgtagaatcaaatcattttatgttttaaattccaaaataagtagcattaaggatgtttggaaataaaaaccacagggaaatatttcataaacttataaatctatgtgtactatatatttttttgaaaggatgttgagggtatagctctgtggtaggggatacactttcttttctttttcttttggtttctcgagacagggtttctctgtgtagccctggctgtcctggaactcactctgtagatcaggctggcctcgaactgagaaatctgcctgcctctgcctccccagtgctgggattaaaggcgtgcgccaccactgcccggctgaggatgtactttctgtgggtgaggccctgagacccacccatgactcctctccccgcttcccaccctaattaacgtacaattcagaaatagatgagaaagcgcagacacggactttagtggagaaatgcacaagggaacagattcaatagcatggacccttcctagggttcagagactcacaaactgtattagcgatattaataaactgatgtgctcaggaaaaaaaaaaattacaggacaggtttataccccaacagtaaatccctcgccattgccctctgggtctggatccgtccttgttgtgggacctggactgtgtgtgactggatgtcgctgatctctcctcccattatcctcccttaggacaaacccaggtgtcttcagctctcccgctgtaccccggggtggaggcaggaaaacccaccctgggttggaaatgtcgaccatagattgagaagcttctgaaaacgaaataattctagagttggcaccatgtgtctgcagtaagaaaagcccacaggaaaaagtagatggcggtttaccaaccaccgctcaggagagaacgagagggtgaagagtaggccccgaggtgggaatggctgcgaatggcggctcatgctttaagcccagcacttgggaagcagaggatagctctgagttagaggccagcctggtctacatagcaggttctagggtagcctcgtctacctagtgtagacaagggctagactcttgtctaaaaaaaaaaaaaaaaagaacccccccactggatctggagtcagtctcttcactgcctcttcagtgtgaactgcggccgctgggctctccaggcaggagacactcgggtttgttggtcatggagtaaagatgttcacagacttgagaacacgtctcccctccctgtgctgtcagggccagaacgtgcaaggcagatgaggacaaatttagtggatttgtagtgttttattttgtgtgtgtgcgcgcactcgtgttatgcatgcgcacacacatgcatgtatgcgtgagtgtgtgtgcagtgcatgtatgtatgtgagtgtgtgcacgtgtgtgtgaatgtgtggatgtttgatgggtgagcttgtatgtgcatatatgtgggtgtgcatgcatatatgtatgagtgtgtgttcatgcatgcatgtatgagtgtataggtatttgtgtgatcacatatgtgcatatgtatgggtatgtgtgcatatttggatgagtgtgtgtgcatgcatgtgtgagtgtataggtgtttgagcacgtatgtgtgtatgtgtgactgtgcattcatatatggatgagtgtgtatgtagatgtgtgtgcatacctgcgtgtatgtgtgtgtgagcatgtaggtgtgtgtgcacgtgtggcacctcccgagttgtaccttgtctgatttgggatctccttgttctttgcttctgtatataccaggctggctggcccgtgggttcttggggattcctctgtgtccacctgcgtctcctgttaggcgtgctggaatgccagtcctgctgtgctgcatggttgctggccctagagctcaggtcttctggcttacactgcaaatgctttacccgctgagccatctcccagcccctttagcagtattctaaatgtaaagaaaggttttattgtagatgagcggcagtttagaatcaagatcgtgtggatttatcgatgagaaattctattgctttgtctctgattaataatgggcggggaaatgaacatgttcatattggataagtagtttataggcctaacataggttctgcttgttttttttttgtatttatgactatactataaatacagtctgagctggggagatgactcttttgttaagggctgtcttgtgagccggaggacctgagttcagtcccaagtgaaaggtcaggcgtgatggtgcatagtggaatccagagctggggagcactgggcaggcacctctccgagttggtcagtcagctagcagaagcatagagggctggcaagatggctcagcaggttcaaggtgtttgctgccacctctgacaacttagttcttcacctaggacccacttgcaggaaggggagtactggtgtctgcaagttatcttatgacctccagccacatgcttggcggcgggccgcacgcgcgtgcgtacgtgcatgcatgcatgagtgtgtgtgtgtgtatgtgtaagacattaagatggagagtgaggaggacacccaccttgtcctgtgacctctcttcacacatgcacacgcgtgctccccaggtcacatgtgctgaacttcctgcatgccaccagtctgcaaatctctgttcatttccagatgtcctcttgttctgtgggtatttgtgagtcttactcataatttgtgagtcgagtgagtttttccacctcctgttgtctttatttcaagtttctcattcagaaggcagcggtagtatactttaccttagtcaacactaccatgggccgggcgacctccgggccctcttaggcccacttcccttactggagtctcagagaagggcggacagttaacctgtctcttctggctctcaggaaactagatgtaaagagtttgtaatgtaaataaactagatgagtgtgtagtagtcagttctccagaagctggaaacccagaggcaaaaactcttttcacacttaagtaggagcaaagacttcttcattcctgttgttttcctattccctgtcttgtgtatttatagacagaggcctgcatgtaacatagacatatagaaatcactcctgtggctctgccctcccccttccctccacccccctctctcaggcccacactctgggggtgtaggttttcctggccccacagctagaaattagagaaatgaaaattaactcctacttctgcaggtgtgtatgcatgtgtgtgtgtgcatgtgcacatgtatgtgtgtgtgtgcacacgcatgcacgcaaccatgagtcctacaaggaaagattgtttatgtaatttcacatctcaaccctttaaggtaatggcttgagcgaaagagaatagtttcctcctatattttattttaaagatttatttaaaatttatgtgtatgtgtgtgacggtgtgcatatgccactgcagtccccacagagtccaggaggagggccatctgattcccctatcccccaagctaggttacaggtggtggtgagcctcctgctgtgggtgctggaagtcaaactggaccctctgtgggatcagtggctaatgggactcggtaatcaataaagcctttgtcaaccgctagcacaccgtggttaaagttgcacagagagtgcactagcaggaacttttgctttcatagctttctaacacaaattgctaatgggatttagataattattagtcataaataattaggatatgtgcatgtgtctgtacatttctattcttagataagaggagttgtgtgcttatctgacttttttggtcattaaaatgaggggttgacagtttacaccctttgattgggtcacctggccaaggtcagctcccactgggcttgaacaagtgaccgtgccccaccagctggcggcaaagaggacagaatatcttagaacatcccaggtggcagtaaaatagaccctaacccatgcaggtgatgttcatcgaacaatgacacggtccgagagctctctctcgagccacttagaggttgatttagttatgttcaggctgctgacatcagggccgtccccagggccagctcctttggggggtcaaggttaagtcacattgtgcttctgtctagactcagtgtttccctgtgcatcttcaccgttgcctctggcacaggcctgcctgtttcctatacaacatgactttggagtattctccagtgcgtccttgtagtgaaagtctgttgtcagagatcagtgtcagcaaaggccagcttcactatttcctgtgctgcgcctgaggaacggggtcggggaagggcataggggacccggggcaggaagtagggaccggggaggtcaggaaatgggagatttgcaggaattattttatcattccagtattaatacgtacatgtgtgtcctgtgtgtctgtaaatacatgagggaaagattatgaaaactataagaatattctgatattcctattatatatccgtatgaaaaaggaatgggataatcacagcaatgtttaatatgttcatatctgtacacatatacacaagtgtacacacctccatatacaagtgagggagtgagagctcagctcatccctcgggtaggaggagaatggacgtgcttgaaggcgtagcagaaggggcttcatctcactggggaagggggctttgtagtgccagcccccaaaacttccccttcctctcaaaactctgaaatccaagcaaagcaaattcgtcatcacactcctccttctctcccttgctatgcgaaccctggttggcctagagcagaactcatatgtcaccatgcctggcttaagtctgttttttttaaagatgtatttatttaaagatgtatttattttatgtctatgagtacaccgtagctgtcttcagacacaccagaagagggcatcagatcccattacagatggttgtgaaccaccctgtggtttctgggaattgaactcaggacctctggaggagcagtccttgctcttaaaggctgagccatctctccagccccaggtctgttttcttgatgtaaagtccagtcttaagggactttggccatagtcccctgacctttggcttctgttggaggtactttctgtcctttagtaatgagttttcctacacctcctaactgctgacctaaggcaaggccacaaatgctcggttcccagggcagcggtcaacactctatacctgaaaccagccgtcttcgctcaggtgggcgggaagagagactggtggatagacaggtatcctcagaccttcccatttcctgttcagtcaaacttgaaaagccgttttgaagatcagaggggttgcctacttgccgaatcccccagtgagggtcagggaggctaattctttgatcagtattatttcaagaaacaaaggcattaaacagtaaaacagaaattcttaggagactggatggtccctattgtggaatatgcttggctctatcgaaaggcttcccacagtgtcctgtcctgtctttgccaagggtagtgctccggtgctggtggcttggagggacctggtttccaaacagtgaggggacctttggagcagtaattgggaatgaggaaggccatctcattaacatgcagcctggctgggacttacccttcacactgccctgcaggtgtgctgaaggtggaaccagatcccaaggcctggatccattcgcctccccccacacttgaaatgtctgacttagtgctgttttgtgttgccagccagcctccagtttctcattaatagattattggtcttatagcatagatccatgttcaggcttcgttctcatgtagttctctctctctctctctctctctctctctctctctctcaatgtagggcatatgtgagtgtgtgcacatatgtatgtgcatgggtatagaggccagaggccaacacagagtctcttcatcatcgaatccccggttcaccagttttgctagcttggctaccagcaagcccctgggttccctcatatgagcctccccagtgcacccccacattcagtttcttatgtgggttttggggattccaaatgaggtctctacactcacaccagaagcacttttccaacagtcatctccccagccccattttgccatatatatatgtgtgtgtgtgtatatatatatatatatatatatatatatatgccatatgaatatgtatatgtacacacacacatatatatgcactcttattctttaatcttattttannnnnnnnnnnnnnnnnnnnccccccccatctccaagaagatgtcatcacacctccacgtccacccccaccaaacctcctgattccctagggcttttattttttaatagaagaagttctgttgagttgggaatgtagctcgggcgtggaagggacatttacttatcttgcacaacgcccttcgttcagtccctcactactgccaagaagtttctggcatatcagtagcttgtaccaggaaatccaccttaaaacagttgtgtaatgaaaccgttatcaacaagccttgcttgcctttgggttgtgttttgcttgcctcccgacccccattgttggtaaagcattggtatttcttgacagcgtgccatttgacacgaggtttaaatgcctgggtgggcagtaatcagtggccaatcacctggtgtctgcaccccctggaggggaatcaagattgtgctgtgtccattttaatttctggctttccaggtggatgccaaactccccattgggaccccggattacatggctccggaagtgttgaccgtgatgaacgaggaccgaaggggcacatacggcttggactgtgactggtggtctgtcggagttgttgcttatgagatggtttatgggaagaccccattcacagagggaacctccgcccggaccttcaacaacatcatgaacttccaggtaagggtcattagaatttgtacaaagctgacgtgcaaagcagagcagctttgagctttctttctctcgagggccagtcactgggagggtgcctcagtgtgttaggtcgtaccagcgaggaaaaaaggctgccatcttagctccatctttttattgctttcaaaatgcattttttaaaaagatttatttattgttatatgtaagtacactgtagctgtcttcagacagaccagagaacagagaagggcgtcagatctcattacagatagttgtgaaccaccatgtggttgctaggatttgaactcaggacctttggaagagcagtcagtgctcttacccactgagccatctctcccgcccctcgaaatgcatcttgagttcacggttgtcatatgtgcatgagcgtgaatcttggggtcgaccaaatggctccttagctctcttctttttcaaacagccccgggagctaaatattaccacatcacatgctggtgaggaaactgaaccagagagatggagggacggcttgaagcggcacaggctgtctgaatctgaagtggggacgaagtgagcagaagagttaggctcgtagtcacatatgtctgtgtatacacacaagtacttctggagtagaagtgaaaccaccctctaatgcgtacactcgcgctccatgaagcccgtttctaaaggctgtgatgaacctgatttagtttaaaggcgtaaagaggcctcattccctcagagtctgtagcacccaattttcatttccttggaatgactgatgtggggtttggatttttttttttttttttttaatgtacaaacactgttagcgaggcttctcttgagttacaattgctctctagataaccaacccttggagctactttccagcctccacttcagtctgctcagtcagttacccaggctcagaggagccgcactgggcaccgctggggaccgggtcatcagctgtgagcagaaagccatctccaccttccctcctcaccgcgcctcagaaaccacattatggtccgtagagaatcggaacacaagtgggtggttggcggcagttggatcggtagttcaaggtccctccctctggctacattttgagtttgaggccagcctgcgctatgacaccctgttccaaaggaaaaaaaaccaaacgcaaagaagcgaggagtgcagtgggagcattgcagaagagaatggccggtggggaagcagccatcaagagctgtggggtggagctgggtctaggcctccgagagaacagcgtgaggcgaccagggagctggaaatagctcattgctgtcggacaacagagagagagagagagatggggagcatgcacaggtcaagtcacaaaggacgctgaaccccaacaaaaggactgggcccattgatgtgaacaggctggaacatgcctttggtctaaagttttgagcgcacaaaactttatttaaaaaaaaaaaaagaatgaaaagaacctgcatgtacgagagatttctcctcctcacttcaggacatgaaccgaatcacggctaaggaaatctttttttttccctttttttgaatagcggtttttgaagttcccagatgaccccaaagttagcagtgagctccttgatctgcttcagagtctgctgtgtgtccagaaagagagactgaagttcgagggtctctgctgccaccctttctttgccagaacggactggaacaacatccgtaactgtgagtacgcgctccttcagccggggtttgggattgagaacgaaagagggccttcaattatttacagccacagagagagctaatgatacagccatcttcgatgactatagccatcttcgcagaagtgggtcggttactaaaccccatctctccatggccactagcacacttctaagagttagaggtgcaagtggcagagttcaagggttgttcctgggcctgtcaggtccttccaagaggaaacacagcctggctatttcatcttcctaaggggagtgtgcttggggggcggggtatgtgtgaagaggcagaggttggcagctggggctctgcctggggcccgagcctgggatgagactaggaacacctgtgttgatacacttcctccagccgtgcttctctttgctcagaagcatgtggaatctgaacccgcatacattcagggactcagtcacacctcgctgtataatcagtgtaaactgaaatcaagtcattaagagcaagaatctgatttgccatcaacagcaccaagaagcgcgctcgtttatttatccttatgaatcagtgatttttgttcggaagtctttttctatttactttgttgttgattgaaggtgaccccgtgacctagcccagtgatcagcacagagcaaggtgttggctgtcctgttgcatatcgtgtttattttatttttggtgctgctgggagacagggcaagtggaagctgttttttttaggtggcaagtctgagcttctaattggagctgtgattacaggttgaaagttcccaatcaaaaaaagaaagaaagaaagaaaatactccaatatctgaaagttttgagcatcaagatgatatcccaggtggaaaattccctcctgagtataccctcatgagtgtttgcattaaatatataaaattacctctgtgcttagacatgtatttaggatgagggactctgtaacctcttatgccatcagctgaggtgtaagaatggctagcatcttgactttttcctgttactccagtaaagtacgcaaggagaaagggtctactcagctcacaattcaaagttatagaccagctttgtggcaaagtcagagtggtgagagcttgaaacagctggcagttcatatccacaggcactggtggttgctgctcagctcagctcagctcagctcagctcagctcagctcagctcagctctgctcctctctcagctccaacagtccaggctcccacctagggaatggtgccgcccacagtgggcggctcttaaccacttgagttaacgtcaacaaggtagcctcccacaggtgtcccatttcttagtctaggttttgtctggttgacaacaataccactgttgggatctagtattttgagccagaggccgttttgatttttctctaaccacctgctgaggtatttcagcagactgtatttctatagagcctttctgacagcttttcttctgtgtgctagccttctgtcactgcggtaaaatattcaaggaaaatcaacctgaagtgagagagagttaattaaggctaaggattttcagaggttccagcccatggcctctgtgctttgatgccctgggcccgtggtggcttagtgctccacggtgggagcatgcagtgtgaggctcatctaccttgtggtgggtgagaatcccaaagaggggaggaattgtacctcaatatcccctttggggtcctgcagtgacctcacccacccagcaggcccggcttaacgaaggtgccactacctcccaggagtgccatagtatggtgaccaagctttcaaacctttgaaaagagacgtttaagccctaagccatagcattgggtagacacgctggttcattttttttttttctaagattcagacaattccctcccagtttcccgagatgagactttctaatcagtaatatattttcatttgctcgtggaaagatttgatagactatcctttagatgttattcaagtccttaatctttccttgtcttgccttttttatctcatcttcttgaacaagcaattaatgtttttatgcatgagcttgctaattatccctaacaacacacttccacttaggtgagtcggtgaatggtggttaattatctgagtaactttattttgtgttttggtaggacttcatgttggtttagccaggagagtttaccctccctgatagggagggggcgttggtcccagggacaagggacaatgcccctcctctttggatccctaagtccaaggctgcccaagtttgtctgagtataaaatgacacatcagttgcatgtaccgggcaagcatcatcctgtctgctttcagtcgagtctgagagacctgcctcaacacctgatatggaaacgtcccgaatagtcattgtgatgtttcatttagggactcggggaccagaagcagcagcatagggaaggtgctcagcatagacacagtgtccctccagtgctttgaaagaaagattttattttacttatgtgtgcacttatgagtgcagtggccttcggaggccacagatgattagacagcagaggtctttcagaaggtggagaaagggctgccgaggtggctcactaattaagagcgcctgctgctcttccagaggaccagagtttggttcccagcacgcaagcacacacgcgtgcgcacacacgcatgcacccacgcacacaaacccaaatccagaaagatctcgagacttttattgactgccagctcctggtgtagttagtggttccaaagatttacaaaacaggtttgcttacagaaattctcttaatttcagttaaccttgtatttggtactatcagacttctagaaaagttgcagaaccgacacagtacctctggaccttagagctgacgcggtacctgtggagctcttgcttcctctgtggatggctctgacagaacagcggctcccttgtcaaaaactcagactaaaattgtcttctaatattctactcaaaccagcttttaccacgcgggtccctctcctgtcgcagagcagatcacatggtgtttgttttgaggtgctcattccagtttagggtagctctctctgaggcttggtaggtgcccggtgagccccgcccatacagagatggtatggccttcatccgctgcctgctagcaggtgtttctcctttctctttgtgtgtctgcaatcagctcagggccttgtgaatcagaacacagcgccgtacgcgagatctgagctgttttctaacatgaattatgcctttgtccagctctgtccctcacaaacacacacggaacaactctcatcagcccagagacctcacggccatcagccttcccaagttcacggtcagtggcgtcaatgccttgtgattcccagcccgctgaacacttccagttcccacaacaagatattgttccttgatgaaagcagcattagcctctttgccttctcacctctaattcttctttttcttgttgtaaccaatgaaaggaagcgcttaacacagcaggtaataatcgtcgaaaatgcattatctcaagaggtggtcctggcgggatgcagacgtgcagtttaagaagagtccaggcaggttgattgacaccatggggtggggggtgaatggggtggtggggtggtagcaggggaaggaagactcacttctgcttcccctcaggggcaggcagagcatccttgccctcctaggtgcaatagcccatggcccaggcatctgaccagttcaagtgtttcttattcttctgctaaggcagtgactctgaggagttactgttgcacaggtgtgtgcaggcagccatgcatggctcagatggttccccgcttcatgtgacgatggtgtgtcctctggcttcatgtgacgatggtgtgtcctctggcttcatgtgacggtggtgtgtcctcaggcttcatgtgacggtggtgtgtcctctggcttcatgtgacggtggtgtgtcctctggcttcatgtgacggtggtgtgtcctctggcttcatgtgacgatggtgtgtcctctggcttcatgtgacgatggtgtgtcctctggctccatgtgatgatggtgtgtcctcaggcttcatgtgacggtggtgtgtcctctggctccatgtgacggtggtgtgtcctctggctccaagtgacgatggtgtgtcctctggctctggcttgtgacactatctcaggtcagagctccaggtctcagcaaggactttttaacccagcagctgctcagggctatgcaatgctgcgccagtgtttcagattcttcttaacctggctcgatttctctagggtcctgggagccagtcggggctctccaccttcctacctagggggtttcctggccgctgtctgctcccgtcagtgggaaggttctcctgtctgggacttccccagagcacatcttttaacttgtttcccctcaatggaactggcacacaggcacctttcccccaaggcctccaccgctcaaggatgacaaaggcgtgcccgtgaagtctctccttgagcgtcgtcgtgggtggggggtggaggggcgctttcactcctgacatgatcctctccctgttctcaacatgaagcagtccttgccagattcttgcggttttccaggtccggtagcatttgttagcagagagtacagtttcttttgatccagccacagtgactcagtggcgagcccatgctgactgtacattgagccagttttccaaatagatgtcactttccctgctctccctggcctcaggcaggtaggagctggactgtgagaatctgctcacacaactgtaaaccttctttttaaaatcgcagaccttaagcagtgtggggtgcatttattttatctcactataagacattgtaatatgtcacatggtattgcttcaaaacctttgggtgttagatccatcttacagatgtggataatactgtaacttgctcaagctcatatggagaaccagtgtggttttgagtcccatggattgttagacttaaagttccctgctttgtaggttccctcactgggttactgagtaacacatgcctgaccttacccaaaacacagaccgtagactccggacctggaaacccttctccactaggagcacctgcccttgtgatccttcgagtctcagaactaagctgggaaaggacatgggactgatgttgtgccttaaaagtttggatccgcagccccaagggcgtggcacagactgtcctgcttatttagagcagggtctcccaactttggcactgctcacgtgtgaggacagacgattcttagttgtagggctgctgggtgacctgcagtgttcctctcagcatccctggcttctacccacaatgccagttagcatcccccttctgtagttgcgagactcaaaaaatgtctccagaggttgctcttggtctcttgagggggagactcaagggattcagttgtagcccgtggagaacttcatgaggaagaacaacattccagtaatgttaattccccaagaccgctactgctaacgagccctggaactgttgctggggtcagtaggacgttcctacccggactgtggatttctactcggattccatggaccaatagcactgtcgtcacctgggagcttgttagagatgcagaggctcggtcctaagttggaaactgtgttttaataagatccctcggtgagccctgtgcatattagggtttacaaagctacaggggaggagaaaaccagatgtgccaggcatctcttcttgctcatctttgagggtcttcctcattttgacttttaggctctgaatgggaggaggaggacttttttggctaaggactcccatgggtgcatgtaactgctaagaatcgttgacttaattttaaaatttgtcatttgcttatttataagagtgtgcgtgtgtgtgtgtgtgagagagagagagagagagcatatgtgtttatgtgtgtcggtgtatgtgagtatatgtgcgagcatgtgtgaatatgggtgtgagcatatgtatgtgtgtaagcatgtgtgtgtgtgtgtgtgagcatatgtgtttatgtgtgtgagcatatttgtgtgtgtgtgtgtgtgagagagagagagagagcatgtgtgtgtatgtgagaatatgtgtgcaagcatatgtgtgtggttttggggggtgtacacatgtgccttggtatgagaatggaggtccgtggacaacttgcgagagtcggtggcctcctttcaccacgtgggtcctgggaattgaactcatgtcatcaatttggcagcaagcaccttcacctgctaagcctgctcaccagcccagaatttttggatttttatgccgtacccctgaggcacgtaaagcttttccctcagatagatggtgcatccttcaagatgatgctataacctcttcttcatttgatagccaaagggaatttgcttctttctctctgttcccacttcactgttgtctctccctgtcagtgaaggatggggtaagcgtccttcattaatacctcttaggcaagtattagattggaatgctaagcccctgctatgtgccagggatctgcacatagtttcctgtttaactttctggactattctatggtaatataaaataccatcacctcctgtccttcagaccatgtccttgttctgcttcttaataacttaggtgttcaaactggcaggatatttctgcagatcgttgaaaagaatgaagccaaggcttcgtaagacccccgtctccaatggttatttcttgtggacagcatttgtctctctcccaaacaagactcccttatagcggcaacacctgccttccgtttctgtacttgagcgtttcgcctgcaacacggcgcgttgtggtgatcactcgctccctcttagcctctttcaaagctgccaggttcagagctcccattgcctggccaggcctctggaaatgcctcgttttgtcagctactgtgaagaggatgcaggtgagcctctctttatggctcggctgaccctgaaatgtgtctctctgccagtctcctcctggtctgcataggaacgagaggaagcaaggaagaaaaactgcagccccctgggtatcagcagctgggagcaggaggtggaggggagggtgggttgctatagagcatgcaggaacttaactggccggaacgtggcaatggaatgacagagagatccaggcaggacttggtagcctcttagggagtatgcaggggatatttatgcgtctcctgggggctgttctgtttttacacagtaagtgatgaagaggagaaataggctaaaaggagctaactgcttatgaattaggattatgggccttttctccttagcaagagtttggaggccacatccagcgatattaaaagtatatattctgcattataaatggagacaacttgctctagagaagactgcagtgttaagatgcaggagcgttgtgatctgggtgaagggtatttcaggctcaggaaataaagtactggttcagagtccaaacaagggaatcttagtctgtggcctatggaagggtggtctgggaatctaggtttcctggtgggcttagcgaggagagtcacggggagcattaagggagacacgcttcaggaacggtggagggctggaaggacttgttctcgaaagacttggttttctagacactgactcgtagggaatctccttactgtttttcccatacctaaggccccttgtgatgtgatggactgtgtccctccgatgtgtgcctctccgtggggctgctttttttttttctgtacccttcagcccaagccagtggtctaggcccagatttcaactggatcagtcagttccaaatgagataagaagatgcttttccatggagaagatgggccatgagaataggtttgttaggaaacccagaaattggacacccccaccccccattcagctctcacttgctgaaagctctttcataaacaagcaggcacggagatgatttggccagagatttgaaattatattaaacatctgggactcttcagcagccaactctccaatcagttctatgaagagtgttgattgcattcacactcattctctgagggtgaaggttggctggaagcaaaggggactgctgcggaagtcacagggatgacatcctaaggacagagcaggtggcacaggtggtccatggctgagggggtggtggcaatggtttccgttgtgtaaatccagagacaataaaatatggccagtgttatgcaccctggtagtggagactcaacttgtagcactcagagttggagacctgagacaaccctccctgacttacaaagggacacatcacccagactggcccctaggagtgttcagtaacctttgaggctgataaatatgtccatcccacagaagactgttaaacttggcttcataggcaggctggccttgccgcagaggcctctgggagcaaggacaggagccggttggctgagtgcctgccaaatctgaatgtcggcatcgagaagaggaggtgctgaactgggacctgagaagaggctaaaggcacagagtcctacctcctagttagacatggccagcgatcgctcagctctgcggagtgccgtgagctccttcctcgaggaaggggcaagtgaggaggagactgggtgtgtttgtctaattcttcccccttgcaggaaggaggaggcagagtagttgctccctaaccaggacgggacagagagtaaaatacctccactccagcagtgggacatagctttgttgaagaataagagacacacaatgtctatgtgtacaatttaaacttggatatgcatttagacatgtgacgccaccaccaggtggaagccgaataagctcccccccccccccccgcaaaacatatgaattaggatttatagactgtttctcctcttccccgtgaccctccatggccctcccctttgtccttcctcatcccgtcctttgaccctaggaacaacagaactgaccccgaacatggtgggtagttctgcttgtatccctagagttcttgtctgtcttctcgtactccacgctgttgtcacgttcctcctgctgaggggtggcccacagttcactgctttttgttgttgggttggggagtctgttgtttatctcatcgcctgccaggggacattggggttatctccagcttttggcccctgaaatatgattgctcttaccacgtgcgctatggttggcagatgcaagcatccattcctttctctggtctaaacagggatggagtggtcagatgagctggtacacatgttgaccttttccatagtagttgctccattttacacaccctccgcagcagtgcccgtgaggctcactaggactctgaacggctggaaccagagtcatccgtgtcttggggtatagtcagctgtggaggtaggcttaagttgtcctcccctatgatcccgatgtgaaggtttagaggtctggggagacagctctgctggtaaagtatgtgctagtgcaagcgggatgacctgaggttagatgccagctccatgtaaaaagccagacttggcttgctcctgtgatcccagtgctggggaggtggagacaggaggatagctggcgtatgtgggccaactagtccagtcagattggcaagcaccaggattagtgacagactccgcttcaaaaactaaggtggagcgtgattaagtaagatactagacattgaatacacacacacaaacacacacacactcctgtacccacaatcacatatacccaaatacaacacacacatgagatcttctgaactttcatacatacatggtcacacacacacgcccacacacaaactgacacacactcctgtacccacaattacatatacccaaatacaacacacacatgagatcttctgaactttcacacatacatggtgtctctctctctctctctctctctctctctctctctctcacacacacacacacacacacacacacagagctatgacattggacttggtaaagaagctatgcaactatcccttagaatacactcaagttcagaattttctccctcacctcagcaggggtagagaggtttggtgcttgttcctctggctcctgtaaactgcaaatttagctcggctggcctagcagggcacagtcaaaagcaccgcagtgtctcgagtcacacagatgcatacaaatgtagggagcgcacattgatgccaggaagagatgtcattggtcactcccgaggagctgaggcagcatcttcactactctgacgttgttaatccagcggcagcctgcctttgtctttgatcgtgtgcctgggcaaccaaagggtggatgtgctagtacgtgggaggtggagtagagtgtctgaagaccaggaagtaaacggctaggaggaagtaaggctaggagatagagaccagcctgtgtgtggagtgcatcaggaggaaaactggagaggaagtgctggtgggggaatctgggtgacatcaaactcatgggccagttttcacatcacaagaagtgaggtcaggggctctgtgctcctgagtgccatgtgacagcgagctgacaacccatccttggtgatgctcacagaaaaggggcacatggacgcccagaaagttgtgggtttatctgccaatcaacaagaaacacaggggacagacaccttacatgatgctccaagggaactggccaccaagtccagagtgtgagaaattctgcaaggttccttagacagatgcgttctttttccccttaggaagaagagtgttcaggttgaaatagacatcaaactggaatacgagcccgctggtttctgacttaaagaggcatcctttgaaacacaaggggaaaactgaacatagtgtcaggtgtggggtgggcagtttgtcacaggtgtgtgtgtgtgttagaggccctgtggtcatgtgtcttgctttttttttcccccttaagtattttaatacatttatgtatatgtgtttgtatgtgtgtgtatgtgtgcctgtgtgtcccacggtgcatgtgtagaggtcaaaggacaccttttgagagttgacttatttatcccgaggagcctgggcatcacttaggggtttgactctcacggtgaggctcctcaccccctgaaccacctcacaggtcctggttatgtgtcttctaaggcctttctctaggactggtgaaacggctgagcaggttaaaatatctactctccggggtggtggaaggaggaaacggactcccgagagttgtcctctgatctccaccttcacgctgtcatgtacccccatgccatacatacctgcactcagaacagggacagcaacaatagcaacagttcttagaagttcttatctgtagatagtagttctcaattgacagtgaacatgacagtcttcaaggtttttttgataggttgggggtgccgttgtgggtagagaccaaggctatgtgtaattctgcaaaccccatgtcttagtcagggtttctattcctgcacaaacatcatgaccaagaagcaagttagggaggaaagggcttatttagcttacacttccacactgctgttcatcaccaaggaagtcaggactggaactcaagcaggtcaggaagcaggagctgatgcagaggccatggagggatgttctttactggcttgcttcccctggcttgctcagcctgctctcttatagaaccaagactaccagcccagagatggcatcacccacaaggggcctttcccccttgatcactaattgagaaaatgccttacagttggacctcatggaggcatttcctcaactgaagctcctttctctgtgataactccagctgtgtcaagttgacacaaaactagccagtacaccccaccaacaaggactttcccagtttttaatgccaagacgccactgatgggagaccctggactggagcatcctgctgcagcaacagtgggtgccatatttgtgtcagcagacttgccaggagagggctggagctgccaaggttggagctgggggacagccatcttacttcttggatatctgtgggcgtgaaagttttggtttttcataaacatttatgagtaaaaagcctcagccaggttcagtggcacatgcctttaatcccagcacccaggaaggtgatgaggcagccattgagttcaaggccagccaaggctacataccatgtatgcaagaaaaaaatatgataaaactttcaggtgttggaactcggggaccgagatgaagaggaccacaaagaatgcagcctctccatgctcatggatgcatgtggttcaggggagaagcattgaaaatcaagattactggggtttgggagcagatcggggggtggggtttgggatggggtacgggaacagggacacaccttcttgccttctgctgaaaggtgtcccaatggatatcacctgacagaaaccctccaaatgcagaccagcagagaagtgcagtcatgactctcttgcaaactggaaatgttcctcttttgagtatttctggcctaatgtagttgctcacggattgctgaacacctagccaagggagagtgaggaagagtcgatctatggtggaaaaatctggttcagttgctgaccagaggtggagggagcgcatctctaagtgtaaatgtctttgggggaaagtacttcaatgcagagtacttaatagttttaaagattcatttgcttttaaagcaggtttgtgtgtgtgtgtgtgtgtgagtgtgtgtgagtgtgtgtgtgtgtgtgtgtgtgtgtgtgtgtgagtgtgtgtgtgagggtgttttccttgcatggatgtctacgcaccagatgcctctctggtgccattggagatgagaagaacggcttactccctcggactggagttgcagaccagacggttgtgagctacggatgtgggtgttagggattgaacccgggtcctccggaagagcagccaaagctcttatctgctgaggcatctctccagcctgggttttttctttctaatttttaactatttctgtgtatgggtgcatttatttgcattggtatgtgcacacatgagtgtaggtgcctgaagaggccagaagagggcgtcagatcctctagagccagagctccaggtggttgggagccactagataaacgtgctcgaagccaaactgttgtcctttggagggaccacaactgttcatctctccagcccccaagcacttaacgctgaggtcagaacactcagatcctgccacccatggcgatcctcacctgaggggatattggcctagctgttagcggacaggtgccagcattctttagattgattaattgatggaagcaaactttcatatgctaatttccttatttatctcaaagacagcatggtaaaaattgatcaccaagacagttaccttaaagtctattcctggctctctggggagtcgaagagacaggtcacatttacttacacggcggtcacaaactggtgttgtgctatgtcagagtcttgattcttgtataatgtgaggttgggtgggtcaagttatcctcactactcttgtaccccaaagagaggggatcagggggtgggcctgaggctctgggcaatggaatctcttctcatgggctgaattacatatctgtatttgacttaacttccttgcctgcattgtttccgtgagagctcagataaagctgtctttcatgtctctccactctagtccttctctcataggaagaacacatccccgggtgtttccgaggtccctgctcaccacatcctccctcttggagccagtcgtcactcacttcccgagtatgcagttggtcacattgactgttacagacctgtccgtcttgggcaaaattctagtaccgacccccttctgcccaccactatgaaagattgcatctgtgcaatccgctaaagactctccctgatattatcttcagtcgagttcaatcctggactttctcttcaagatcagccttacccacagctctcttgggctgtcactccagctatgggctttaaagcacctctcctccccactcgagttcacggagggagcttttagctagctcttgagattccatccctcccatgctaccagctttgtggaatattcagaaacccttttatacctctgcttttcacacctacagcccgaccccttagtgatgcagacagctccctctccagctcagagcttcctttatcgtgtaagtaagatttttttttaacatcttcatatttgagcgtatactctgctttgtccatcaaggggtagggcaccatgaagctggagtgaattgaaagcgcctttgattgtagctcattagctgaccgttaccaacatcaagtgnnnnnnnnnnnnnnnnnnnnnnnnnnnnnnnnnnnnnnnnnnnnnnnnnnnnnnnnnnnnnnnnnnnnnnnnnnnnnnnnnnnnnnnnnnnnnnnnnnnnnnnnnnnnnnnnnnnnnnnnnnnnnnnnnnnnnnnnnnnnnnnnnnnnnnnnnnnnnnnnnnnnnnnnnnnnnnnnnnnnnnnnnnnnnnnnnnnnnnnnnnnnnnnnnnnnnnnnnnnnnnnnnnnnnnnnnnnnnnnnnnnnnnnnnnnnnnnnnnnnnnnnnnnnnnnnnnnnnnnnnnnnnnnnnnnnnnnnnnnnnnnnnnnnnnnnnnnnnnnnnnnnnnnnnnnnnnnnnnnnnnntttggagacagtgttttgctgtgtagtcctctccagctttgtaactattgcttctcctgcctcagcctcctaaaccgtgggagccaccatgcctggcttttcctttctcacccttttttgagagatgccggttcttcatgtgcagatgagtactctgaagtatatcaccacctgagtttcatacaagtgctgtgttgcacggagtgacacatcaagtctgagaaattagcccacaccccgggggttcttgtcacgcgttcctccaacagaatccatattaaacactgactgagggcggcggggtggtgctctgataggtgttcagcagcgcacggcattccaggtctttcttagcagaaaggagattcccctgcagagagctggagacagtagacccaaccaagataggcttgtctgcggctgtagaaaaacaacaggtgggaacggagagctcggtgggccgtgagccaggagggcaagggcccttatgtcacttacgcctcttatggcaagacacctcttaacttcactactgtttaaaagaaaacatgtttgaagacaatacattttctcctctaaagattttaatgaatgtcaggattagagaagagagggtcggaaggaaggaggacttggggtgggggtgtttatgaagggaaattaactatagtccttaaaataacctttgtgtctgagagcctcgttctatcttataaccaggggtggggtggggctcccctcaaagttacctctgccactaagggggatgtgccgcgcctccaccccaaacattgttggtttatttttaaaaacacagggaaagctccccccacccccgtttttcccccacgttttacactgagcagaggcttaatgtcttgctgcgcattcgtcagtgtgctaggcatgttgtgtgaggagagccagcgactccatgacagacaccttgacagtgtaccgcataggtactccttaccatacttttcagatggaacgatctcggctttaaagccttttcggtccatccaaacatcaggcactggatggagaggcacacgcaggccagtcagacatgcctttgctcgatgcatgcccggttggcagtatcacaatgtgctgggtcagtgtaaatgtaacacactgctcaccatttcagtgagatactaattccttttttttttttttttttgccaaagggagaacacagttttgtttatttacacgtgtgtgtagtgtaggtgctgccacatgtgctgccgccgtgcacgtgtgtcagccaccgggccacctcctgcggtcagttctctccgctttgcgtcctcctggggcatggtctctcttgctcttcttgctgctgtgctgcgttctgcaggccgcttcacctgtgagcttgtaggcgttctcctgtctccatctctagctccgtcacaggagggccgagagttgggctgtccatggaatctgagtgcgggttgttaggtttgcgcggcaagcatttctacccaccgagcgccctccagcctcatcctcctctcctaaattgtataaaggtcaacacaaaagaaaacaaaacgaaccatgtggcatacgacgtccaagaactattctcggcttcctgcctctcccatcagtgtggtgtcagacatgtaggttttaggcttgagcggggtttgggttttttgtttccatctgtatcagaagtgaagtagttcactaagggaagatgcagaagggacgggggtatgctacaccgctcctttggcttggcttcaagagggcgagaagggacccagaggctgagggtgaggttgcccgtgacctttgtgagagagtgctctcttggctgagcggagctcagggtgatggagggctgcctgcccggccccttccacatgctgctctctgggattccatccctcactccctccgctcccaatgagagctgtgctcagactgttccctgggtgccagagggtgatggatcgggcctcttctgtgctgacagtgggcgcagtctccacctaagaggggccgctaggccgtcttcccccgcaccctctcccatctaacgaacttgtcccgaccctacacggttgttgtttcgagatgtcgtatccaggcttttagctttctcactctgtgtatgtctcagagctcctgtgccttctgtcttctcgataccgtgggggtggtctacaggaactccctgagctgggcgcctgtgattcacctagggtggggcatttctagccagccgaccttgctgaccctgcatctacagagagagtgtactcctcaagtctccctggtgggtcactgagcttatctgtagctcatttaacctgctgacctgtttcctttccgttttgctgtgataaacaccggggcagtagcagttttgggggagggaaggctttattcagctcaggcttccacctgatggtcggagtgtgaacttggagtagccagtcacatcatgtccgcagtccccgtcagagagaactcgcgcatgcgcgctgttgctcagctcatttcttttatacaactgagggctcagacccagggactcgggccatccattttagactggggctcctcccgtccatcatcaatgagagcataatcacaagaaccctcaggccaccctgatctggacagtctctccttgggactcttcccagatgattctcaattgtgtgacgttgacagttcattagatctgcatttaacattgagttttcaactttactcctttaaaaaaaaacatttatttttatcatttgtgtgtctgtgtgcgagagtgtcctcccgcagggagatacaggtggttgtgagctgcctgcagtccgctgtgggtatgggatcaggtgatctcgaatcctctgcaagaacagcatctgctcctaacctctgagccagtaacaagaccttacccttctggatgcctttcaggtgttcttggttcctcattcttgggttagaatatcaacttacttctgtgataaagcaatatgtctactctgtttggtgttttgacacagaggctcgctgtatagcctaggctcacattgaactcacaattttcttgccctagctaggtttctggtgtgcgccactgtgaccgcctctcctggcccttcaggtcactttcctctttcatcgtgttggcgcccagccttggcatgtccccaggatactccagaactccttgtctgcagactatggggacgagccagtgcacctggcttagcttgctcttttcttaggcttcagagagctggctctctcacctcagtctcagtgcactctctatggaagaagggtagccctccccctggccgagtgtgttcacacgcactcgctcaacactcgcgtgtgccgctgttcatttcccatgctcccggatcccatggagccagctgccccagctgcagtttctaagtagccaccctagctcttcccttctaaagggcctagatgagggggtgggcatcctcacccttcttggggcattggctcatttctgggccacttcttcagctttgaggctgcggcttctcaggttgtgtgagccttcgtttgctgaggacctgttctgaactgaccacctggcaagaggttgacgtctctagcttttaatctgtgctatcagttctcccttctctcaacttgaaaattatctcacctttctatataccccccactcccacccctcagtgctggggattgaactcagggtcttgcccatgctaggtagcattctaccactgaactatattctcagcctgttgcgcacacgtgtgtgtgtgtgtgtgtgtgtgtgtgtgtgtatgtgtgtgtatgtgtgtgtgtatgtatctgtatgtgtgtgtatgtatgtataaatgtatatgtgtgtgtatgtatgtgtgtgtatgtgtgcatgcagatgtgtgtttctgcatgtagaggccagtggacagtctcaggtgtcgtttcttaggtatcattcacctttaaaaaatgaaaacaatgttttctgtatctggttttgtctgtgtctatggctatgcctgcatatgttccagatgcttgtggaggccagaagaggtcatcagctctttggagctggagagaaagatggttatgagctgctgtaaggaaggcaggaattgaaccctcatcctagaagagtagaaaatgcccgtaaccacggagccaccactttagcttttcccttcctctctctgagacgtgatctcgccctggccttgaactccccatgtaggccaggctggccagccatggaatgccagagatcttccagcctccaccgcaccgctcagtgctggtgatgaggctgtgccatcctgcttggctttatttatttgtaacctgtggggattgtactcagccccttatgttggctgactcaactctccaacctccccacagcccccagagaccgagtctcgctatgttccttgagtttatcatctgtagcccaggcaggccctggccttctgatccccctgcctcagctgcccgagtgatcaggtgataggcctgtactggcagcccaagcctcttttctaatcttgaccgcagtaatgctttgagcatggcagaactttacagatgagccttattttatagtacagaaattcagaaatcataattacttcactgagggtggctcctacctctctattaatcatcttcctaacacagaaatggaattctattttcgtctcctacagataaattagtatatagtggaaagggattcaacttctgcgaggaattataacgccatggtagaattaacacaaacactcaccttggcgtgcctgtgccttgtatagcagagaccgactctactcagcgcagatgccgcgctgtctcactggacttgagcggctgctaaggtctgccacatcatgcactgtacgccagcaatgataacggccacaggtcaccttcatgggtgttcaccgagtgccagaagccacactgagcactttgcatagattcacctaacagtcaggtgcagaggcaggagaatcacaagtttgaggccagccttcactgcttagggacactctttcaaagccagacatgacctccccacagatgcctacagaggctgagtgcctttcccagggtcatagaactggagtgggtggaattgggagccattaagccaccatgtttctgtatcagagtcacctacgtatttcagtatgtttatctcgatgtccttatcttgggatggaagcacttccttttggtcatcatacattgtaatttctgtgatttcaattttaatcttccaaaggagggattgggtgagcacgggcagtcagatggggtttgcaccaccattagatttgcaccccaaccccccccaaccccccgcttatgggtgtgcacaggggatgcgaacccctgcatccagtcccagttcccttcccataagctaatgttgaaagcgttaagccccggagcttctgactccagcagggaaggctgagctgctccccggagagcccggaggtgttagataagtctctgttagctcgcatttcacattccctgatcttctcttccccacctcacctcggtgcacctcggagactgttcttttgcatatcccagaagcacccgccgcccctccgcgttcacctccctcttcctccgcacccctccacatcactccggttacttctctgcctggcactgctttgaccgttgtccccggggatgcttcggcaacagccagctccttctgagtctgtggggctgaaggcgtgcttgctgctcaccccccaccccacccccagcacagaactctgtctggaaaacaagaggttaaaaaagaagtctggaccgtgaagggctgtgacaactgtcctagggggagctctagcgagccctggcgggcagtgactcatgcggctccgtcactcagatcggcattggcccctgccacgcagggtggccaggtggggttaccgccagagcacgcactaaggagtggggaggtggtagcatgcagcctgcactgcgggggatgtgatgccggcttgccaacttccccctgcctggtccactgcggacgtcccagcctgcaaccatggtaacacttctgactggaaatgcccctgggagccccccacgatgggcagcctcctggtgactgatggacagccgctcacgcgtctgagtgagagagcctagtaggtctgcaggcggcagagacgatgtgattccaccccccctccccagctgggagtcatgccataagaggtaggagcctcaccacagatgtgcgtctgtgggtctctatgtacccctcaccggtgctgggtgctgtaaatcactgcaactttatctggctgtcttttgattatgctggttgaactgcggtggattcgatgggcaggggtgtgttgaggggagtgggggttttggggggggagataatgaactaaaaaggaaaaaaaaagtggttaataggatctctgagtagactcagctggctatgaatgaaccagactgcagcggtgacccaaccgcggttgtacagctttctaagcccaccgtcctgttctctcccctcattctggctaagtcatgagacatgcacgtcttccatctgacagccatgcatatcaccaactattaatcattttagacctgtctggaagaggggctcaatgggcttaggtcacccggcaccctggcactccagcgtccagggatggaaggctgctggaaataatgagccaggagctgccttccctgggtgagttgcccaagcacttcagcgggggggtccaagtgacctgtctgagtttatctttcacctcacccactgcccagagaggcaagctgtctgcgggttggtggccatgttggcagcgaaggggttaatctcttgttgctgtaggagccgaggctgggtctgcctgcgctaggagctgggttgaaagcagtcgctgcagtgctgtctccaaacgcctaaggagtaaggcgctttttccccctctgcaacagtgtggaattctgaattttttctcccccccccccttgtttttcttttaaccagctcctccccccttcgtccccaccctcaagtctgacgatgacacctccaattttgatgaaccagagaagaattcgtgggtttcatcctctgtgtgccagctgagcccctcgggcttctcaggcgaagagctgccgtttgtgggattttcgtacagcaaggcactggggtatcttggtagatctgagtaagtgacggtgactctctggggggacctgcatggatggccggtacacagagccaaaggtgctgatgctggtgctgtggtgtgctgtgctgtgctggtgggagggttgggggagtgcgtcggagggaagcctctgggctgcctgtttggggctcgtggggctagactgttgatgctcggttctgcatggcgtgtcaggtgcctgttcctcctgtccatggcatctgaacagtcagctgggcactttgggttagttttttccatctttagtcttatttagagggaggagaagagtgggagatttctagcagtgcagatacccggttaaaaggggaaccttggatgagttaaactgagctgtctgtccatccatctcaagagagaggatggccggaaccctggctgtatcggaaaggatccgaaacacgggatctcaccagcctaaagggtttcccaatgggtttaaccgagctgcaagtggctgaaccagagctctagcagagagatgacgctgggctcctgtccaagtatgctgcaagatcagggatctggcagctgagccattccaagtagggagagagcactggtggccagaagaagccccgttccttcctgtgagcccccaggagcaagtgtgatgcagccggcaactaaaaccctaaacaaactcggcagctagaacgagcaatagagatgtgctgtaaccctcctgacctgggaatcgtcctctctcgtctgataggaagcgttcagaagacggggcagacggggcttgcttgaagggtcctgatttccagactcctagaatctgtgttaaaaacagctgccttgggatgtaggagttggatgccattctgtcttcaggggagcaatttcccctaggaaggtctcagaccagctatgttgttctccaggttccttagctccctcacaccgaggctcttgggggagatgctgcccacttagaacacatttttttttttaattctcatgggtagattgattgcctgtttggtgtgtttatagcttagatattgattcgaagggatatggtattggctcctggatggtgtctccccacaggtacaattctgagattcttaaaagatagtagattttcacatagaattgagcatttgatataagctggggagagtgtgggccgttcttgatttttgacaggggctttttacaatgagagatgccagggtaggcttgctttcttaccttgtctgaggtctgggtttaaaatccaggtggatgttggcatcatcaggtctaccttttttgctaatcttaccaccaaacgcagcccagaggaaggcaggagaggcaaaaatcttaactcgccatggaatgtgccatcatcagtcagaattgcagtggtccaagcagggctaggaggtttgatgttgttgttaaggacccaggcaggagccagaggcccagtggaggagggtgcatacttagtgggcagtgtaaccttgacacaacaggctcactgaaggtcacagatcctgactaggagaagatgtgtcgggagatgttgctggtctggttagcagtgggccaggtgtgttgagagaaagctgtctgatgatattattgatcagtgatctcaaaaacctgggaagcctgggtgggggagtgaggtttcaggagcaatgatgtgagggagcccagcaccacggctactctgagacagagtgtgattaattgcttgttattcaggaagactctaattgcatctttctacttctcagaaagctgggaaagggaggtttgtcacaggggcctctcagcgtcagggcccaggcactgggtaaatatttgttgattggatttactcatgagccggtccccctggaatgtgtttgtgttgctctctgatttttgaaggtttgcagtttcacctttggccgtccagaaactaccccccccccatccctaacgcatccagcgagcttctgtttgtgccccggtgtttaataagatcctcacgaaaataacattcctcataacacagccgtcgagtttgttatctggaagatgtaactgaaggcgtcttatctttgggggaacttgatgctctttttccatggcagttcagggctggaatcagcttcctctgtcgtgctcggtggtgttgctgttggacctggcttctttgccgggggtggtttggtgggcgaaaccttcagccacagtctagaaatcccgtccacctgttggttgtaggtgacaccccctgcccctgggcatgttggatcatagtttattgggaagccaataaaagagactcagatgagattgcgcaggagatcctgcagtttcatagacagaggtggtggcatggtctctgggtactacctttgccctgtagtgacaccgctctctccctgcgtttccctcctctggcttcctgcttccatcaccacaggcttgtatttaccccacagttcctcgctcgctcttcacaccaccgaggaaactgcagatcctacttcctgtgctgcgctagggaaattgaccccagatttgttagcggggaactgaatggaacgcacattcagaagcggggctgaatgggccagcgctgtccacggggaccatggcctcaggagtgtctcacgttgctgtgctccggtcgcccctcacatttcaggatcttcttttgcatggggaccccagactatttctaagccagccgttcaacacattgctaagttccggctcagccagaagccagtcagtctcagggtgtgggtgagtggggcatagggagagcttctcgctgcccaagtggggagcagaggagcctgaggagaagcagaattgtttggttggtggtctttggtggagttagctttggagaacatccacgccagtgactcttttcctgtcccctccccccccacaacccccaaacgatgctgggcattgacccaaaggccttgtctgtgctaagcaagcactctaccactgtgaccattgagctacaccacatcccaatcctttcaccttttactcaacaagaacccagctccttccccatgctttgagtgccatgagcccctatctgcttgagctgtacagtagcagggtagaaacagaaattcgtaagtggaaggtttataaataccatgaatcctagtatcatggtgtgtcgtgaccccccacccctgagctgtcagcacagggtttctttatgtctatctttcttcctggactgcctcattgtcttgggtcaagtcagggtgtttcttcaaggtgatgtgaccttgatgaggctggctttgtgagtctgaggggtctgagtgagctgtgtcaggaaggatgctctctttcttctgccatccaggcactctcctttgagcggatctaaagataccgggattgaaccatcccttcagacacggcagaagatcagatggcaggttttcagtgccccttcctttcgggattgggagttgtttgcatggtaatgtcctcaatggtgatatggaaagcagtatgcctttctaaagagcttctaggaggacagaccaaaacataaagcatttattgtcatacctggtacaagaaaaggcctgtgactgtctcccgttctgtttcttgctattctaaagaccagtctatatatttatgtagaactcttccatatgtcctgagagactatggcaaggactcagcagtagttagggagttagccagacccacactcagttctccgggtcttgggagtttttctcctggaaatgcttaaatgttctggccaactgtaggagttaccattctgttgacaagaggtgttctctgtagaaaagtagctgagaggacagaaggacaagatgaaatcccagacagagagatcagaaggacaagatgaaatcccacgtgggcactttcccatcaagttgactgcagcaaagtagatttttggaaatagttgatagagccgagcaggcgcgttagccgtggaatagcaggatagatgaacaggacagcctcaaggagcacgtgaggagcaaagccagctcacgctttcttgctaaatgaacagtgatgatctttcttggaatgcctgtccattgccccgtgcaggctgggtctcgttggtcctcatggtctggcacaggaagctgtggtgggcccttggagcatttgcatgcttgaactgtgcttacccgtatgctggtggtgattgggtgctagggctcagctatgtgaaagacggtggattctggttggagaggaaggtagcaagggacagagggttctcattgcctggtcttgcatggtatccaactctcaggtttcattctcaaatcaactcgattaccacagcagcccaaaaggaagcactggctgcctttctcccacttgacatgtgaggagactgaggcacggagagtgtgggcttgtccaggggcttcagagcctcttgaccactgtgctatgatgccgcactgtataaacgccacacacgggaggacttacaggatgcttgtatggtgcccgggttgacatgctcgtcagaagtagactccgtttgggggaatgaaaagccatgaagctggggtaggtgtgaagagagatgacatgcaggtcaaaaagttgcttttgttttttggcctttatgggtgtgctgagtaggtggcctatataggtctcagatttcttctcatttagagacacttatgtgtgtgtgcaagtgtgtatggttgtgtatgtgtatatgtatgtgtatgcttgtgtatgtatgtatgcttgtgttttgtgtgtgtgtgtatgcttgtgtgtgtatgtatgtatgcttgtgttttgtgtgtgtgtgtgtgtgtcttcacacatgcacacctgcattcgtaaccactcacattcttactcgctagagaatagcagttcattgaggacaggaaacggcattgaccttggtctgtatccctttcttcaggctgattcttcataagctgcacggtgaatatctcatagagtgatccaagctctcgccccttctcttcttctgtgtagcccaggctcagcctcctgagcgctggcagtgtaggtgtgcatggccagatcactctcagggccgccagggatgactctggttgcgttctctcaggtttcccatttctccttccagttccctcccacctagcccccagcgactactccagagaggggaagggagggatcgttcacccctacttttattgagctacttaggagcggtgcgagtgtgggggtcttcttttcaaaactgcttttcctagaactgctgaaaaggcaggcacgatggcatgcgtcatgtgagtgtagtgtaggtctatactcactgtgccggtgcctcggccaccacagtggcccccgtgctgagatggaaagtctctgtgggctggggtggcagataacccggcccactcaacggcaaactcaaggccgtgtcttaaacgcaatagaaggtgaggaccaacatcccatggctgccatccgacctccatgaacatcctgtggctgggtgcacaagccaactctcagacatgtgaacacacacagagacagacagacagacagacagacagagggggcggcaggcagagacagagacagacagagaaagtcacaaagagaagaacagagagacagacaagaaattgtttccttctgcatccagccaaatcatgtgtgactttttttttaaatagccaacaatgacagcccctcctcaagtcacctattcgctacatccaagagacttgatggtaacagccctcaagtgcctgtttgtctcctgccattaactggatcttcgcctggtggctcgcatctgggtgttgtcttgggttttctgatctcctctccctcattcagttctattctgtctagtcaagcacaccttgtcctctggctcgtcttaccctgttctccgtttagcccgagcgtgtgcctgcctctaggcgttggcaggaccattctaccatcttctcatttgtcttaaagacacctttaggaactcagatccaaacagccctgtcccagccctgcagatcaggtgctagaagatctgtcacgtgtgtgtgcttcggggggcccccactgactagtttgcttgcttattcgggtcccttaagaaggttgtcattgactaagcctgctccattcccaagcttggcttcaggttggcaaggcttcctttgcctgagcaaatcccacttggttccctctgctttgcccttggcctcctggcctctctctgatgaaccctcctgaaggagtcatacgtgttgagtaagctcttcccacccccccacccccaatccatacagtacaaggacagtctcaaaactattgacttccccagccagtgatgcaaaccgctggactcttgttagtcagcgcatatctggatggctttctcctttgtcctctgggccctgggtactatctctcttccctgactactccttcagtatctgtttaggcccctgaaacctgcatactacggcctgctgtcccattcagtttttgactttccctccctccttccccacccctcctcccctacccctcttcccctgcccctcttcttcctnnnnnnnnnnnnnnnnnnnnnnnnnnnnnnnnnnngaactcctcccagagccaaggctgggtgatgtcattgtcccgtggggaccttcagcatcgtctctgtgcacagaattaatggcctctcctgaacttgacattcaagggtagtgtgccaagaccctagcctgtgttcccagtcctaccttcttcttgtcccctagatctggccaaactatcccaggactcactgaggacagggctgtgtgtccttccttttgccacaaacagggctttgccaggttgaactttcgtcaaactgaattagattgaagtggttatatcaatcccctctgcccagatcacacagcgtccgatgagcgtttcctgggtgtctagaagtatatgttctaaggaatttccacacactgtctcatagcctcaccatagtttacttgatagacaccaagaaatcactttggttacctcagatctctgtacctaccacctgaccccacacagttacggctttgctagttcgtgtgtgagaaggacacgtttgtctaaactgtcaaggtaaaggaacaacttcccagagggatcacccacacggtctgtactgtcatgtcgctcagcaatatctgtcgagtttagacaataaacctggagatgaccaagcctgggtcacctttgaggatcatacagaccatcctttgagctttagagttcataaaaacattctttattttgggtgactaactgtagtacccctgtgaatagtccaggcttgagaattagacagtcaggggctcacatctggctgggtcccaaccctggccagttttgagaatgagacactttttttcagatttccatgggactgtcgtagtgtctgcctagtagttttcctgcagagacgggtgcccagagcagggcaggtgttcatgttctgttggctgttgttactgagatgtgaggacggagccagggtgctctctgctctctgttccttcttgcttcctctctatagaggcattttgctggtttctgcccatcgagagaattcagttccatgtggggtgcctgacagatgtcttaatatctgcatccaattcttaactcttaacagagttcgtgggctgggcagtggtggtgcatgcctttaatcccagcacttgggaggcagaggcaggtagatttctgagttcgaggtcagcctagtctacagaatgagttccaggacagccagagctccatagagaatttcttctgtcttgccccctcccacccccacaaacatatcagttacagtaggatctgtgccttgtgacctgtccccaacaaagatgtcacctattctgtctcacccttgactacttgagtatccccaaggtgggtgagtgtgtgtcatgggatgctgctgcctcaggaccaagcatgtcttctctgatgttggggctggacagttttctttgcactcagccttgatcctgcacagaaattcttattttggattcctttgtccatgatgatctgtatactgtacctgcccagtacctgcacgccatccatccatccatccatccatccatccatccatccactcacccatccactcacccatccatccatccatccatccatccatccatccatccatccatccattcacttatcaattcatccatccatccatccatccactcatccatccatccactcatccatccatccactcatccatccatccactcatccatccatccattcatccatccatccattcatccatccatctatccatccatccatccacccatccacccacccatccatccattcattcatccatctactaatccatccatccatccatccatccactgacttaacagatccatggctgtaggcttcaagggtataaatgtgaacaggactgatgctgtccctgtcctcaggaagccgctatatacacaagagacagattcaaatagtggccagggctctgtagaaatctgaccaaaatggggaccaaagtgggttggccaatttagactgaccaggaagatctccctgagctgagcactgggacttggtgggagaatgttgagtcacctgaggtgacactcctgaccacctgtgagctgatctagaagtcttcaccgacctcccgtgaggtgccaagccctatgttagctggacctgcagtgagtctcattgcgaggctcctgtcctggtggtataggtgaacactcattcattggctcattcactcagcaaactcttgctgtcctactatgtgccatgtactttctaggtactaaggataaaacattgaagagaggaggcaacagttcctgcctacatgatctatcaaaatgccagagtcggctcttgatggtgaccccaggaaggttgttcctgggtaggtgggtgggggcaggaagtgaagccaggaccactcctgtgagtgcccagacaacagacagtaagtatatcagagcactagggagctggggcttgcatatcctcaggcagtgtggtcttgggtgaggtgggagagcttggccttgcgtggggtagcccagagtagggaggcttggtaggatagagcacagacagatgtcattttctaaaggaccattgtggggggatggttggcagagggatgagggtgaagtcagggtggattaattaggtggtgatattccttcagcgacgaggtggggagatgccgacaagacccgcaaagcgaggcgctcactgagagccgagaatggtattaaaaaaaatcgcatgcctggctatatttttatgaatagtgagggttttgataaatggtttttgtgccacgtattaatcattctagagcaaatgtttctcttcatctggagcccatgggtggtggcggtggtggtggcggctgcggagcatgnnnnnnnnnnnnnnnnnnnnnnnnnnnnnnnnnnnnnnnnnnnnnnnnnnnnnnnnnnnnnnnnnnnnnnnnnnnnnnnnnnnnnnnnnnnnnnnnnnnnnnnnnnnnnnnnnnnnnnnnnnnnnnnnnnnnnnnnnnnnnnnnnnnnnnnnnnnnnnnnnnnnnnnnnnnnnnnnnnnnnnnnnnnnnnnnnnnnnnnnnnnnnnnnnnnnnnnnnnnnnnnnnnnnnnnngtttccaggaggctgcggcgggcaccactggatattttaaattgggcttataaagttagttcataaatttcagaatgtacagtcttaaaagccagcgtatttttggaaacagtgctgttggtttttaaattctcttgtaccacgttacagcttgcggttgcatgtatttttagtgccgttggccacaattaaggtgaggccctaggctgagctaattcgatgactctggttttagcatctagtctctacacttggttgtctctgaagcacgtgccacctgtggtctgtgatcgggcaacagatctctcaggcaggggtgggcttccctaggaagcacgtggatggtttgatacttgcacaggatcctaggcccactccatccacagcctgctctgtggggtggaggtacacactggattctcttatgatactaagcgattccgttaatagctttcatgattttttttcttagttctatggattatttataggcagatcattgggaaagctgcattttatcatctctcttaaatgtgagacgtgcgaaacagttttttgggtccaatgcaatgttaagcaaacatcttctccaggctgcagagggacgggcgagcgggcaagcccactgtctccctccgtcttgtgctgtcctctctctgtgcgctttgggccctctgtaattataaagcagattgtatatattaggaagagatgttgatttcagagtaaaattttctagaaaatagaagcagggggaaaaaaaggaaagcccaagcttggcttggccctagaagagacggcactgctgtgtgtgggtgggtggctgctgcacccgctgctggggcggggggtggggtggggagcggggagcggccctccccctccacgggggcaactgactgtgcatccaagatgcgcccgggggggaggcaagcaacgcgtgggcacacggcgtgttcttttattagcatcttttttgtagtggatcccatccagtccagagcacaaactggcctaggcttctgacatctatcctgttactcagtttgaattgtctccctcccccacccctccccatgaagcggtggagggagagtttctcttgtgtatatgggttgaactgtgtctgggggtggctttggaccaacttagcttgtgggtgcttttgggttcctagactgtcttgaactccgacttagcaacaaacacagccactcgtggatagaggtcactttctcccgagagacccacccctctctttcctccacaactctgcctttctggactgcttgtcagtactgtcccgccaagcagtcgagctgagatctgaacttacaaccgtcgattatagatgcctccacttttaactgtccgtcactcaaacatggtaaaggctttaagatccgctcttactcacaagcacacatgcacgagtgcccatcccacagggttgagcagatctggtgaggtagccagtaaagtacctgcacatagagcttgcttgctgagtggcttccccctgctggaagggctggtgttccttttccctccagggtggttcctgagatgagaaatggaggcttacagcctccacactggagtgtctcagcctgctgttggtgacatttggggctggataagtcctgcaggttcctcctatatgatatagattgttgagaagtgcctctggctccttcatactgaatgctagtagcacctccacccttcaccccgtcctccacacccctacccccacccccactctgcttctaccccacctaaatactaagattataaagtgtgtcctaaatatcaccaaatgtatcctggggaagagccactgagctgtaggagagaattccatttttttggtaaagtaaggtttattcatgtgttttatgttgtgtgttttcctgcacgtatgtcaaatttcatcactttccgggagttctgggccacaggcgtgcaccgaggcctcagaattctgatgaagtactccacagaaaagtggttttgtttcattcttaaaacttctcttcaacaatataaactttaaataacgccatgtgtgcatcagactagacacttgatgtctgaaaaccaaacctgtatgaggtggtttggttgctgtcagctgcactgggatgagacctcccgagctgaggcttacattacagtcaattccagggaaagctactgtcagtcactttggaagctggttactgataaacctagagagagtgagttgaggaaatgttctggaatgtttgttggggcacaggggacactattcaggagtgcatatttggggactggagcggtggctcggtgattaagagcccttgctgctcttggagagggcccagatttggtttccaacaaggggcttgcaaccgcctctagttccagttccaggagatctgatgctctcttctggcctcttcaggcttcttcatgtactgggtgcacatacagtctcaggcaaaacacaacactcacgaacataatttttttaaaaattaaaaaaaattctattggagcttgtcattggcactatgagttgattgccttagttgtactgaaggtaaatattgtgtatcatgtaagtgttctgagctatatctggctttaagaaatccacggagatggtatggttagattaactctcgtggacatcatggtgcatgcctataatcccaacctctggaggctgaaatagagggatcatgtgctcgcagtcggcctaggctacatagtacaaccccaaagggcgggtgacatgcctcacctgtaaagtgtctgagtgctggcaccattggaaggaaaaaacctaattccctaaaattgttctgtttcacacatgtgcatcacggtacatacacacacacacacacacacatacactgcataagtaaagcagtaagcttattaaaatgatagagaatgctcttctcagttactgcctggcacctgtgctcgtcctgaaattcagaccaaaataagtgcgttcccactacagattgctggcctcacaggacgtggccaaagtgccacctgggagcaaacactgaggcgggccacgccagaaaccacgagctcgttcttctaatgagcaccctggtttcccatcccaatcattctaatggttccatccattgggatccttatggagtttaatggaggcggtacctgttgggccaggccctcgttccccggcgcagactgagtctgtctgggagagccccatccccagctttggtcacaacagttccatctccgggtgactgctggctcatctgcactgagggacaggaagctgcccagagctgcggtgaccgacctctgccctctgccctctgccccctcccgttgtctgtgcagtttgtcgctgcaggttgagttcagtcccagtgtttcccactagagctttttttagatgtggtttttatttattcttttacaaaagataggtttctttagcatatttagtctgaagagctcttaattgccatacttagaactcttaaatgtgaacatttgtcaggcatcaaaacagcagagtgaagagttggacatggggtgactgtgcgccgtctcctgcgggtgcttggccccggctttctgggccctattaaccagtgacctagaaacacttcttcttcctttgctttttggcgaataagcaatctgttttgtactcagaccagcgaacattcaactttaagctctgctggagccctgcttccgcatgtcattaagtgagcgacatcccatctcaccatcacaaggcacatgcagttgtttttctaaaagggtgctagcttgcccttagatgcaaagaaatgcggcctgtgctgtcctgcatgatgtatgtccttttgtgaccagtggatgccccttgatcactgaaggaccagggaccatccctgtctcctcaggtgacctgggatttgctctctggtggagcgagggaaactcaagactaccccaagcaaaccctacaaagtcagggctcttcctgtgtgtgtgtgtgtgtgtgtgtgtgtgtgtgtgtgcgcacgctcgcttgtattttggctaggaagtaggcttgtgagaagtgttaaaatttctaacccaatgtgagagtttaaaaaaaaagatttatttctggattttaatccccgttgcccatttctatgaataatcattgtttgtcttgatgtgaataacagcgcacagcacattcagccccctgagtgttaccatttcaagcaactgttttaggcctgtgaggcatgtgctatttgcaaagttgcagggaccttaataagaatggcaacagccatagtaatggttggacatctgtcaaaccctcagtgtgccaggggtgtgcttaaggctctacgtgtgctcgctcgttgcacccattttacaggagaggagcctaaggcttggaggccacacagcttgtctgtaacaggctaggttgtacacagagcagcccaactcccagttgttgatttacctggctgccattgagggtagagagagctgtcagccagtcagtcaggtgtctcatgttgctgcaggaggctgacctcttttaggctgggaagttgtctggggcagcagagacagagcttgaacctgttgggaagatcctgagtgcccatcagtcaccagctcctacagtcctgttaccatggcaacgaagatggggcagcagcaggcaccgccatgtccccccccccccgtgcattggaacctttgcttgctattagctggactttgtccttcactggctactgaggaacaccagatcctcacctacacccctagcaaacgcacagggcactgcatatgcgtgtgaacgcccttcccgtctatgaaatgccggtgatgtttcctgagcatgggcatccggtgaatccggccatgcttagtcgcccgcttcctatagactaacagaaaccattcctcagccagcagggtcctcaacctcaccaggcttcattcccctcatgtgtaacatgagcataacaaatcatatccaccccaggtagaggtgtgtgaggcgtaaacaattaaagcacgtctggtgttcaggtagaaccaggtatgtcccagagctcagagggcagacacgcacatctcacgttggccccgcaacaagtcaccacaagctgaaggtgtaaaagaacacacgcttgctctcttgtgtttctgggctcagggatcccagtgggtttctctaggactgaggtcagctgagatgaggccgtgctctgcctgcagacttggaggagtcagcttccgtgccttgcccagtgcctcgaggtcacctgtctctgagctgtggatggaggttcaccatctctgtgcatgtggggtgtgtgtgtgttcgcgagaaggtcagggaacctgtagcccttagtgtggtccctgctttctatatggtgtgagattaatctcttgctttgtggctccatagaccaggagctcaagccctgagccaatccctctcagcctgatgccgcatcttctaagccagtcattctaagcagtgcatttatatttctcacctgtaccctgcctccgtgtttgcctttctatcccccactagagcctttacattggacctgttcgggtaatttaggataatctctgcattttaaggtcattaacctaatcacaaccgcagagtctgctcactgggtagtaaggtctttgtagcttctggatttgggcagctgcatctttgggaaaggaatgagaatatcctttggcctcctaccataagcttgagctggttatagaaagtcaaacggaacggaatagaatggaaaggacaaggtcggaagagcgacagagagccttacagtgctgttactagaaccactcagtcctgtctgccctgcctcagggccaatgtggctgctgtcccctgtccccagagcatccttcttccttgatttttgtgtccctagaacctcctcagccttcaggtctcaaatgccaccttctccaggaagtgtgacttcccgggtcacactccctccattaactaaagcaggtcctcgctttatgagtaccaccatgttatcaggttacacccccctcttcccctcaagaagtctttctcatatgtaagctctttggaatctttcctacacgccgcctgatctccctagaaggtcagcttcaggaggagcccatgccaagtccgctctgctgtgcgcagtggctcccagtgagtgttgcctccataccagttgagtgtgtcagcgaagggagccccgccaggcttggccaggcatgtggcaagttcttgtctcaccatcccactgtacagtcatgcagaccaaggctccgaggagccacttctggcccccagggttcccttgaatctgcacctacctgccaggcccttgctttccaaatgctttcccatgctaaccacgcagaccacttgacatttttttttaaaataattatttttatgtttaggtctgtcgtgtcgagtctggactcccctgccaaggttagctccatggaaaagaaacttctcatcaaaagcaaagagctccaagactcccaggacaagtgtcacaaggtatctatctccacagccggcctccgtnnnnnnnnnnnnnnnnnnnnagggatctgccgggggccactgctgagcgtggtgccgcctccctcgctgaagtcgtgcctccagcagctcagagggagaggactccaggcccagacattgccataaatcctttaaatcttaaccagaggaggccctggatttaaaaaaaaaaaaaaaaaaatcggcccgtttctcagcatgacccagccggatgtccacttcttccggcaggcggcctgggtcctcacctgggcctgagacgcgtcccatctgctcggagcgaggcgaagcgtgtcttgccagtcctttaaaacttctgctcgtgtccctgcggccactgtgctggctatgttctcgtctcttaatgctcactgttcctgcccagaggcaactctctgaaaaaaaaacatattaagagagaccactgcttgtgtgggacacctgagagtacaaacgagtaatcccctctcggcctggtcccggatctgtcctccaggtctttgcaaggagatgggggggaccaagatggatttaggataaaattaaactggcatccgaataagccagaccagtacaaaaaaaaaaaaaaaaaaaaaaggcaaacaggtgactcccgatgctggtggcttctgtgctaagtgggttagagaagtgaccgtgcgagcgaaacaggacttggatgacaggactgacctagcctttggtgactgtctttttgaagaactgtatgctcctgggcgaagaagcaatggtatttccatcacagctcttggcgaattagcggtaaccaccccccaggccaccaggtggcctagggcccaccccacatccccaacccctcttgacgagtgactgcccccacgcaaccccaccctacccccccaggtcccttttaacccgtgcgtgtgtttatttcagatggagcaggaaatgacccggttacatcgcagagtgtcagaggtggaggctgtgcttagtcagaaggaggtggagctgaaggcctctgagactcagagatccctcctggagcaggaccttgctacctacatcacagaatgcagtgtgagcctcccccaaagcccccttctctcggaggcggcactttcccgtcgtgtgtgtctcatcctgttccatgacagctccatgaggcacgtcacggcccgatggcagagtagagagacaccgagtggaaaggcagagttagcgtgaactaggtgcgaggcggagtcgggctggaaccggcactcagcagacagccagcaccgactgccgagctccgccaatcccagagacaaggatcactgaagccttccgcagagggtctctagtctaggctgtgtcagctttgaggactaaactccccaattcgtgtcagaaaacataatttggatccatccggaataaaatttttttattcccttagaagcagtgtagcccaggagactcggcctctgagatccaagctctgtcattatttccattgcgactccattcttttttttttttttttttcctttccttcacaagagtagactgtctccttcattgtcttgtggacgttttcattcaggtgttctcgactgtgcccaatgaaacagtcataagaggtggaatcacacatttataaagtttttttttcctcacgagggagaggaaatctatagaatgtggctgattaaggataactgctatgtttgccttccagacttggctgcctttcagtggtgggtgaagtttacagctgtgtatttcagctgtctctctcagtgccacggaagcccggggggcggggaggaaactgatggatcataggtgtctaggaggcgggtcaggaggccggtacccaactggactctgaaatgacagccaggtagaccatgcagctgttgcttctttgaaacagacggatgcacccgagaatctggaaatgcctttcatgtcctagattacactagatagtcatggaggtggcggttctgacagacacaggatcttactggctttaagtcctgagcatacaagtgagtaggtgccagaataagtagacagtgccagacgattagccgatagagtttccggctccgcccccgtaaagttgagcttgcgatgactggcttttttcaccaagtagcttttacagggcgaaaactggaaccggcaacccgcttcgtgttgtctcccgtggcccatcacccgacaccttcctggtgtccgcggagctctcctaatgaaccttttcaaccagaacaggggatccgtggggcatccctattaaacatctttgctttccgcagagcttaaagcgaagtttggagcaagcgcggatggaggtgtcccaggaggatgacaaagctctgcagcttctccacgacatccgagagcagagccggaagctccaggagatcaaggagcaggtatgaccactcgccctgagccttcaccgctggccccgagccatgtggccctcagcacgctccaaccactgatctcaggcatgtttgtgaggcagtgggagtgggatacaccggtaggtcgtatggagactgtagcttcgccatgattcacaccagcttgcttgtctattcccgttgaaggccgtaactcataatatctactatttttaataaagaacactaatggggtagcctaggggtagatctggcccccttcctattttctgtgcctatttctatgtcccaggccaagagtgacttttaaattcttaaatgattagaggagagagggaggggggggcggtttgtgacatgagattttataaaatttaaatttcagtttgcataaaagtttattggaacacaatcatactaacttcctttatggtggcttttgtgctacggaggcaaaaaaggagccctgtttttagagtggctataacgctaactttttttaccaaaagtttaccaaaccctgccttggatggttccaaaggaagtcagtatttttaaatagcttttctgattcactgccagttgacaagagagaccaagatcacttatagtttcacttatatatctattaaaaaaaaggttcctagaaggaaagtccgagccaccgagagcagtctgagctcacatagtaaatctgagcatgcgtccctgtttctaggagggcagcgacctttgcagcgacctttagagagcctgctcctctctccccctctgtttctaaaagggttttctctggctcatttttatatctcctcattgtttttttttttaactgtcttttgaagacactgtaaatagaaactttaatgagtaagtagagagctgagttatcagctgccaggccactccttcacttcatgaaacctagtgggacactgacagaagtgagcctccggctcctgggatccaccaacttggccacctgggggcgcaactgagagacaattcccgcagatggctcaacccccgtgtgtgtgaggtggcgactctccttgccacctcaatacgttttaagtgacgggttgacaagcctcctgttgtgtaaggacattataaataaatgtgcacagggaactttgcaaatgggtcaccaagtcctggcacagccctcctccgaggctccgaagggcacacgcgtgctctgggacttctgacaggtgactcatccacctttatcaacatagctttttcttctgctccatcctgaaggttgcaggaggtaggttctttatctcccggcaaccctttgtgtttggaaattaatttaggggatatcctggggaaatgaaagctgcctttggccaccagagggtgtccatgagttccatagaaagaattaatcaggacattttggaaagctctgtgctctggtggttgagttcaaagaggcgcctttggtgattcgtgtcacagccaggtgcatgtggaatttcagatttaatgactgccaaaagttcctatgcggccagagaaaacttttcggttctggattttactgctcttcaaaggaggatgtgtttaaaatggtgttgttttgttttgtttttttagatgcccactgtttgtagacacagagaatgcatttaaggcttccagcaaactcgtagtatttagtttttggtgcactgacatctcacggatttaggatgagcccccagatttttcctgcagaactcagttttttttataactgctcatttttgtttttaatcctctggtttttttttttttttacccagttatttcttacggagcatgccccctcatggtttgactccaaaatcacaaaacagagtgggagttctcagaagtcattggagcccccaggacttccggggagtaggaccatccccacaaagtcactgtaggtggacggtcagtttctccgttctgacccttcagctcagtgccatgagctgttccatgctgagctccagcagccttcccagctgtccttgcaaacagacttgctggttggtcggctctcagcttcctcctcctgaagcacggatttgctaagctgttggctttgcgggatttccttagagtctccatcataacaggagactggctgacagggttcttctgctgcctgtatcagctggaccaggagcagagagggatgctgtggatgcttgctttccctccagtgcagccaggcagctcaggaagcagaggcatctgggtggggacaggggtcaggtgtgcaggtggacttttggactattttattgggttcttatagctctacctccctttcagctcttactcaacccttctaacccctaccctaactaggcagggggaaagcaggttagaggggaagagggcatagacctttttaaacgacttccctgctgattacttccttccctgcttccagttccttggggcaagtccagtcttcgtagtcaggatatccagtttcttcttgtctctttgctcatgaccacttgacaaactgcagtgacaggagcaagccgggggcccctcccagggctctcaaatttatactctctcaaaagttcccaggatgtccaaatgtcacacactcacagaaacagtctgcagctggcacaaccacacactcctgctagagcaccaggcaaatcataatcacctgctgtgaagcagcctcttatcctgcacctgggattaaaacaaaaacattcgcatagctgggctctttaatgaaaccaaaattctcactacacaggcacatttgttcttgttctgacaaacaaaaaccaaaccaaaacaaaaaacaccccataatagttatattttctttacaagtttaagaaggaaagaggagtgtggataaaggtgcttgccttaaagcatgaatgcctacgcttaatccgtggcacccacaggatggaaggagagtcctaagtcctacattctgactgtcctttgtcctccacaggccacaccgtggttcagacagacagacagacagacatgtgtgcacacggacacacacaaatgtcaaaaattttttttttctaagggtgatttttctgggtctttgccctcgtcacagcttgagggggctgtgtctgccggcaggctcctttttatgctcagcacaacagactcaagtgtcacaataatgatatttccaacgtgggacaataatctggagtaataaacagcccacagtattcaaatattttaatcctttcttgtatgtagcccaggctgggcttcaatttggattcctcctgccttagtctcccaactgctcagattttgattttttttttcctttaaaaatattgagcttatagatcctaagtattgcttttataggcaacattaacattttaatacttatatgaatgtagtgttaaagtataacaatataaaatatatgactatgtaagtgtatatttgtaatgtatttttatgtgtatgtgtattacatgtatgtaaatatgtcttctttttgatgttttttgagacagggtctcatatagcttgggctggcctctaccttgctatgtatctgaggatgacctttgaactcctggtcctcttcctctggctcctaagtgctgggattgcaggcacatggcacttcactagcctcctccttctcctctgcccccggccccacccagaaaggttgaaagggtcaaaggcaggcccagttctaagagtcatgaaattcataaggtatccccagataaggggatctcaaagaaccccttgaaaaggctataccacttcactatggcctgtgtcccaggccaggcacccacgcaccctctctggctcacgcttcccacatagggtgagtgtcggcacctgagctctaggctcatttttgtaatgtcctctcctcagtgcctgtcaggggtgaggatctgctaccgtgaggtcaaacaggcactgaacaccctactaccacagagggataccgcactgggccacatgagtgcaggtgaaaagcactccccacacaggaatgacacaggtgatggctgcagtttgatcccagcacccatgtggtaggagagagaaccggccaactgacgactggtttctgaactccacatgcatgctgtggcacacgcttgccaggaatcatgcacatcacacacacacatacacagagagagagacagagagaggaggggagagacagagctgtcataaaacggctgggattgtagttcagtggtagagcattagtctagtatatgcaaaagagctgccccattgacaaggacaaaataaccaaagagtaagttgcaaaataccgacttaaaaagcacctgccgccagtaccctatctcagttgatgcttcacctccaagatgtcagtgtagttcatgaacggcaaagatgtgtcggcttcatccctgtctttgtcctgtttgacctgcctgttcctgccctggtcatgttaggcaggcctcataatcttcccactcagccttcggttttctgtggaagacgatttctatcctgggttccgaagtttttcaaggccattgcctgtttcattgtgtgtgggtgtgtagggggtgggaagcctttgattcaactgttctcattcggtgttaaattcactttgaaaaacatcggactgtttggaacgggttttaaggctttttgtttcagggaacaagataatttttcttgggggaaaaagtcgtttctcccacccccagccccctccgaaaatcactctgtcagggtccagggttttgtgactcctccagatttcagggtgactcgcactgcaggcgcggcactaagttcaaccttccgttttgagcccagaaagattaatggtgagaaacagacatcgatgtttcaccctcccagaggttccctccgaggcttccaatcacccccaggttccgactgaaaggttaattccaaagctggtaccatgtctaattgtgtcaggaccactcagcatccgaaggacaaatccatagcaatgagcacccttagcggagaaccccgcgcctgcgcacagtttatctttattcagagaagagcccctgtctgtgcgcctgcgcatccctgggggcttttctgaatccgtgcggccgtttgctctaagcgtctgattcaggacaccggttcctggtggggttcctccggacacgtgttctgcattaaacgcaacttaatgttctctcccctccccccccttgcctctcaacgcccctctgactcgtctcttgtctctagattgtttgagtcactctagaaacggttgtctctgtccatctgtcctttgacacataccctccaatgtacatcttcctccgtagttgacccgcattcgctctcactgccctcctcttgcggtggaggtctgcggctcatctcctgtcctctgtcccatctttaggagtaccaggctcaggtggaggagatgaggctgatgatgaatcagctggaagaagacctggtgtcagcccgcagacgcagcgatctctacgagtctgagctgagggagtctcggcttgccgccgaggaattcaagcggaaggcaaacgaatgtcagcacaaactgatgaaggtagtcagccaccctccaagaggggactccgggggcacggccctggatgatcttcacaagatgcaaggccacgctggcttaacgagtgtaggttggagacacaatgagattctttggaaaatgccccatctttatttatagataccattatttttgtttgttgtggttttggtctcagaggccacggaagtaccgtagatagtgacagtgggttgttgagatgtcccaatatgttatcttttttacttacaggctaaggaccaagggaagcctgaagtgggagaatattccaaactggagaaggtgtgtcttctgtgatggggttgaccagatagaataatttgtatttgaaaatagttgtaatattataagtgactgcttactacataagaatagttttctagtgatgatatatttatcttatttcattttattttggggacagggagtgaatgcaagtatgtactatgctgaactatgcttcctgcccctactgtagtggcgtttgggtgactgtgtcaacttttagcagtggttctaaaagagaagacagaattttttggttttgtctttttttttttttttaaagagagtttcatgtagcccaggctactcccatgctcactgtgtagttaaattcagcctatcggcttcttctgattccatcacctaagtgctgggatttcagtatgtgccgattttaatgtaacacacacacacacacggtcctacttcctcccagtaacacacaagcccaggcacttggtaaaatttttattgtgttcatatatgttgagagtcctgcttaaatagtccataccacagtttgccttgggacaggcccatgcttctctgacaggcgagtgtcctttctatgttagtaagttctagaagacaaaccccagaggctccgcagaaacccggaggaaataggtgctgactgatggctgtgtgttttctctccctgcctttggttgtttatagatcaatgctgagcagcagctgaagatccaggagctccaggagaagctggagaaggtgagtgtgggtgacgggggctccccccatttccacgtacctgcctacctcaccctggagcagtagtgaagagagaagcagggttagtcaccagtagcagagacaaaggggttgtccgtcaaaaatatcggggtcctgagtttaggttttcctttggaggcatgtctgcagtgtttgtttctaaaaaccaaacttgtgtgaggctctgggacagaaacccaaaggtggcttctagtgccttgggaggctagcgggtatcacatatctgtaggggaagtctggtttgctctctaccaggactgtgaaaggttccttctcggggactccctggtgtcctaatgtgattgtgtgtgtagggcagagggaggtgttggcaaagtttgtgctaatagtcctgtttctgtagtacttttcaaactttggtagattgctttagctttatcaaggaataattgaaaaacaaaaagaatatatatttggggctagagtgatggctgctcttccagaggacctgggttcaattcccagcaaccacttagcagctcacaactgtctctaactgcaagatatggcaccctcccacagacaccaatgcccaccaagtacaaatgaataaaaatgtaaaaccccatatacatatagtatacagaattgtgttgtgatgtaaatattcagctgtggcatgatcaggctaataaacatctcagtcacatctcgcccagcaagggggtggagggatcatgacatggtttctacgtcagatcatctgcgccaggtttgctgggtagcttaacaagggcagttttgacttccttttgaaaagcactctggtaaactcagagccatgattttgctatttgccccttaactcacaggcttaatcatctcaggtcaatttataataacagttacagaaggactgggtctaagccctgcacttttaaacttttttgtaccaatagaagaaattcgtactaatgaaaacctttattttgcatcaaaataaattctgtaccaaaataaaaagaaagaaaagaactctgataaccagagcactggtatccatcctcaccctctccaaaccactgaacgtccacgaggctgtatatgacacatccctgggaggctctcactgttcgccactgacagcctagactcatccaatgtgttttcttttatttgaccaaaataatgaaaattaacttaaaattacaaaaaaaagaaaggaagaaagaaagagtagaagaaagaaaaaaagtattctaacacatttcagggtccactctctctcacgtggcacattgcaggtcttagaatccgtgttttaatgtcgtttccactttcttattttactggagtcttgctacgtagcccaggctggcccaagtccattatcctacttctagaagctgcctccacaggcctgtaccagctaaccagctgcacttgttaaaatctcattttatgcgatttgtatgaggacgctgcatagttttttcatatgtgctatgaatatactgtacataatcatcttgattcatctcataaattcagacagtgctgcaaaagttgtagtacagggtagaccaaaatgaaagttaataaacaacaaaaatcggaggcttagccccctctccctctgtctgtgttgtggattgtcacagatgccaaggctgtaacagcctttgaaaggtcataggtcatatcccagctctgtcttagcatgttttcttactgtggttgttttcccattccccacaggtagaacgatcaggagcaagtaggttaactggatagatcagctctttgatacctttcgtttgcttctgtgtctatcattaagttggagagacagaggatttttagacacccccaagaaagggaggcgcctcgtttataactacaggactagttccaaattcagtgagattaaaaaccagtgtacctaacacacacaaaataagcaataaatgaacgctgcttctgaaaagtgggtccgaagtgatcagtgtctcctactttttccagggttttgtcttttcttcttccacataaatatgcgtcaacatctgtgtcctgtccccctttctcccgccaggctgtaaaagccagcacagaggccaccgagctcctgcagaatatccgccaggcaaaggagcgagcagagcgggagctagagaagctacacaaccgggaagactcctccgagggcatcaaaaagaagctggtggaagccgaggtgagcggcgagcggcggcggggccctcctcagcctcaccgcctgtttgaccctggttgttcctaaggtaaagaactcgctcctgtttgaccaaaacctctttccctctgaagatccctttgaaaggcgttaggccaggaagcctgtctccacagctcagaggggacgggacggctgctggatgctgtccagcctgtttccctccggcctccgaagcaatctcagtgactgtattttctccaggctctctggctgccgctctgaagttttgtcttctccatttttttttcctcaatgtttctaacacaatgtggatctaactcatctggtctcctcggcttcacccattacctgtggcaggcagtgactctgggcctgtgttctgggccctgtccccatcagattcttttgttgttgttgttgttgttgttgttgttgttgatatcaattatataactatactgaaaacacgaccggctgttcactgtcaaacgtaaacagtgcagacaaaataggagtatggagtgagacgtctctacccgtctgtgcctgtccgccgcccgtcttccctcccttgtctcacgcagtggactgtgacacacttagtttcactgtcttgtcttgtctttccccaggtcttcccacttccccactgcagtctgcatgtgaccctgcctatacatggctgtctggggtctgtcctcacccccggcattcctggccgtttcccagtgtcatcctgaaatccccagaatgtgtgtgaacagtgtctcaagttcagagtgacacccccccccccataactgtctccagaaactaccttcctcttgtagtatcaacatggcggtcacaccccctgctattcttccggttgccccagccttgaaaccttggcttggcatcgtctgcttgtctctgagagttgctgttagtgagtcaccgagccctataaatataaatgagctgactttcttccttgccctctgcttctgtctccttcctcacaggctggaccccttcccctctcttgatctccagctccagctctgtccatctccccaaataacacacagtgtaagattcatgaacccccaagttttcctgccctaccctgaatctttaagggtgtctatgtattaggtgtgccctgagctctatggggcagccggttgacacccgacccctcgggcactgattcttttccattcgctcttctccaccctgcccttgcagcggtccgtctgtctggcctttccttggagctcctgttgggttctgaccaaggttgtttcctctgagcttcctttaatgcaactgtcgtgtgtatgagtggcctcctgcaccccagcccttatcccctcccgccccccattacccatacttaaactgtgcagcccagcatcccccttcttccatccatcaataaccacaacaccccaaaccttttgctttgtggtcctaccccgcccccggcccccgccactcctaatctgtgtgtgtttatttgtggtttgtcttaccttctccaagggcagagtgcgtcatcttcctctgtattccacatgacgcccagtgtggtcctttgcannnnnnnnnnnnnnnnnnnnnnnnnnnnnnnnnnnnnnnnnnnnnnnnnnnnnnnnnnnnnnnnnnnnnnnnnnnnnnnnnnnnnnnnnnnnnnnnnnnnnnnnnnnnnnnnnnnnnnnnnnnnnnnnnnnnnnnnnnnnnnnnnnnnnnnnnnnnnnnnnnnnnnnnnnnnnnnnnnnnnnnnnnnnnnnnnnnnnnnnnnnnnnnnnnnnnnnnnnnnnnnnnnnnnnnnnnnnnnnnnnnnnnnnnnnnnnnnnnnnnnnnnnnnnnnnnnnnnnnnnnnnnnnnnnnnnnnnnnnnnnnnnnnnnnnnnnnnnnnnnnnnnnnnnnnnnnnnnnnnnnnnnnnacgccgcccactccctggagaacaaggtaaagagactagagaccatggagcgtagagagaacagactgaaggatgacatccagacaaagtccgaacagatccagcagatggctgataaaattctggtgagcaggaaccaaaggtgcaaagttagcggtctcacagggaagggggcaagaaggctcgcacgctgtcctgtgggggtgtcaccgcgtaggtggatggagagagaggtggtgtcagagagagccacctgcggagtggaaggatgaaccaggcctggacatcttagcactagtgaccagccactgcagtctttactgttccctggtctgctctcacccggcatcttaaaaaatggaattgggcctttgtcatgtgactcgttcacacaccctcctctcagcagagttctgcttggctgttaattcggcaaaaccagtgcaaaaagctactggggctttatagacagctacggcccaaactcagattctcactctcagaaaggaaagaaatgagtcatgcgggttccctcagagtaagtagtatccgcccggggtggctcttcacccactcaccccgctggcggcggcggctgtgtttattgcctttctccttgcctcagctggagcatctatctcttcatcactcagagtctgtcttcggcactgatgaccaaattaacgtaacaagggggtgttggcagacatgttgacttatgtccctggcccagggagaaggactgcctttgagcctcactcccaaagtcagaagttagatgtcatgtctgagaggctcaggggtggcttgtaattcatgcccaatgcgcagttgttccccccagaaggaggtggggatgttaaaaggccacttcatctctcctgtcacttctgggaagtgggatccccatgggtgtacgtcctcgaggatggctgccttagaggtttgcacagtattgacccctcataggtgactctgtatattcaccaatgttaagtatgttctggagcaaatgcagagaagaggagttggtcaaattgttacgctttgccatccagtctctatatttatgtgcatgtgtgtgtgtccgcacacaaagacaaacgtggttgtctattcttttccgatctcttgttctgtcttcaaaatctcttctggccgttgtcaggcacgtgagttttaccatgagtgaagacaaatcctgccgctgttaccctttacccggctaacgagccatcaacgaaaggtttcaattcttctgtggttcccagagggtttccctacttaacggtgacgtgttcattcattcattcaacaaatatttaatgagcttctactatgcaccaggccctgttccagggagctggaaatgtagcagtgaacagggagaactgctctgacacatatagaaaaagagacattaaacaaataacaacaacaacaaagacaaaaccacccacctggtagtgaggtgtgagtgaccaggccctgcgttttagatgctgcccatatccttgtcagactcagtgagtggtgggtcttccctttaaccagtttgtagatctctatccctgtttctgtgacatcttatgagggctgaacctgaaaaaagatgattaacaagtgattcgtaaccagcaagacaagcaaactttctttatatcagaatgtaccttgttacccacccaagtgccttcgtgcgtggctgaatgtgccctcgttttaacagaatgtgcctcttgctcaagacccttgtgctcgggctgcagagtgtacaggacacgggccaagagcggtccttcgtcctgtcatggactggtgacactgggaagcacatcccaaatatgcatgctcttccgataagaaatttcaacatgtgtcattggggccctcaatcatataaaggagtcttcgcctcgggcccttttgcgcacatgctcaaagcccgtaaaatgtttttattaattagactcctgtttatgtccaatttccctgggagcacgtctggtggatcgcagcagattttgcgcacttggtcttaatggacaagcttgacactgcagaattgcgggtttttgtgagcatgtgactctcagaagctccccccaacagcgccctcctcccctgccttctgttttgtgacgtatctcacataatttcctcattcctcagaattcttcgttgaagagaacgtgggatatcaacttcccatgacctctggtgtccgtattaaccaatgggcccagattcctggttctgtgcggccatgtctgcagttagggtgcctgcagtgaattggatgccgcctttcgtaaagggccggtttctaacacacgggcaaatgagttgccgtagttttctaacgaatcatgagttttgttgaaggacagacagccatagaggaagcatgagcgccgtccgctcaagctgctcacgcaaccccagtgtgtctcctcctcacgcgtgtgcactggcgtttccatggccaccacccatgttcccattcacacacttcacagaaacactaagtcatgtgcccatgtctcaggattcacatctctacattccagtcgtttacaggagtcactcacaatgccaggattatttccatacttgctaattgtaattgctttcctttttggcaagggttcttgagcaatgtttaatgagtgaggaagacctcacccctccaattgtttatctccataatacatcaggaccccttttcttatttaaggctgatgaacaccaacaccttaaatagcctgaggcttaagacagtggtcagggtctttgtgctgtgcggaacctaatgctgtcttgctacctttatttctctgtgtaaagtcaagccgctgcctgtcttgacctgtcacaccatctcatctctgatcccagcctcacagcccactggctctgtgtgtgtgtgtgtgtgtgtgtgtgtgtgtgtgtgcgcgcgcgcgcacgcgcactgggagagccagagccacgtgtggtgctgatttccttcccaagagctttagtctagtgttgcaggagcaacggctacctgtcgcgtgcattgcctgtggcagtcatggtccctgtgagtgtctcgtgcctgcccgccttggtgcccttccccgagcccacctgactgactgctcttttgtgtccaggagctggaggagaaacatcgggaggctcaggtctcagctcaacatctagaagtacacttgaaacagaaggaacagcactacgaggaaaagatcaaggtaaatcgacctcctcctccgtcttgtctgacctcccctgcatagcatctgggcatctaggcatctgggctctccctgggcctctgggctcagcacttgctagagcaaagggcagaccagggttgtggttccatctttatttatttgtttttaaccccgctatgattcagggcatgtttaccacattccacattcttcgcttttaattttctttctgcatctgtgaattggtcaggtaccccttccttttgtttaaagtatgtccttaggaacctaattctgtgacgatctggggttgttttgaaaatgtgtttgttttgtcctcatttttttttatttatttttttaaagatttatttatttattatatgtgagtacactgtagctgtcttcagacactccagaagagggcgtcagatcttgttacagatggttgtgaaccaccatgtggttgctgggatttgaactctggaccttcggaagagcagtcgggtgctcttacccactgagccatctcaccagcccttgttctcattttttaagtttattatttatttttttacttgcatacacgtgtgtgtgtgtatatgtatgtttgagtttggcatgtgcatgtgagcgcaatgtccaaggaagccagaagagggcgctgaatcctccagagctcaagttacaggtgactgggaagccaccagagcaggtggtgctcttaactgctgagccatctgtccagctccttaggttcagtctttagaaatggcgtgtatttatggtacaaagcactgctatccattaggacatttttttatatgtctgtcttttacttccttcacatttctggcattaccctctcttgtgtctgaccccccttttggtttccttctctttcactcctgctttcccccaactccttctgtcccaccccctactcctctaattcagtctctgcttcctgtgtgcttacacacactacatagacacacacacacacacacacacacacacacacacacacacacgccagcctcattcttaggtgccatgttctccactggctgctccagtgctctatggctgtctaccccactctcctttggcttttattttgaagtcacgtgtaagtcttgctattaccttcttgacaatgagcctctaagctccccctccacacacacacacacaccccttagtgttttcctctgcctaattcttctaggtctttctgtgagctgttgggatgtttgatctcttttactttactcctgcttgaaatttatgatatgttgagtacattggcacatttctactctactcaggaaatgagcattcagtgttctcaggtattatttctccatcttttgtcccttttttgccattttgagaacttgaatagacctgtgctaggtccaggaatccaccatcttccgtgttttcctttttttcatatctctgtgctatatctaccactttgccttccactttgctaactctctctcttaactgtgtctaaactgcggaccaaccaatctactgaggttttaatgtcaggggtttgctttattcctgggaagatattctgtttgtttcattctcaagtttactaaattgtggatgatgattttcaattctacggatttatcttcaggtctgcctttcagttcttgaactgcagcgggcagagctgtctgataattggtgtttttgaagactggcttttcacccatctctcttttgctctctcatgatgtccgttccctttcgtctaactgtcaggctgcccattctcttcggaaaaatcattaacgggatctttgacttctgtcttctctcaaagcttttaaggctgtggagtctgaagcttaagttcactgggttcagcaaatgcctcctgttagaaacagctttgtatctttcttagtgtgcctctgcttggtttttggtctgaaatattttaattctcttcccacccccagcccctgagaactgagcctcgctccttgtgcatgactttggtcattatatcctatgtgatctcttccctgaccagacatgctagtttgggatttgtactggctctcagctttaatgtttggcatgagactttatacggtagtcgcctagcccgggtatgtgataacggtaacccctgtggaatccactctgcggtttgcaagaggatatcgaagaagtgccagttagaaggcatgttttgtcttacatctctaacccctacccccaccccctttcttcctgctggtcggacccctgtggaagcttggcccttctgatccacatgcagctctttttgagacccatcactgccaaggtcagggtctgatttagaacagtcaccttgaccacgccttcctttgcattagcaccctgaagaaaaaggaggccccccgagactgggctttgtgtgtgttgtgcagtctccatctctctggctagacagaactttaccttgtagacccctggggaacattcagaaaaggctgtttccttctgccttctctactgggatccacacagacgtctgctcgttaacctttctgccttgtgttctggttccagcttgtctaaggccgtctctgtcacagctctggtcgtaccctggattcactgtgttcttgctcataattttagaaccaccctcagaaacccagcagagcggtcacttcatcatcctgctgagccctccgctcctcgtgaccccgctgtcaaccttccggtccccacagacgtttgctttttttctttcccccaccagtcaattttagtttaaagccttctttgaaacatgttctttcctttctcctgcgggccccttccctgctggctggctctttttttagggacgctgtcccgagaagctgtaaagggcccctcacaatagatcttgtgggaaaggcatatttcagatcccatctgtgaccccagttctgtcagctttattcccagtctcctctcgttgttctgggtggcagcgggtgtcgttcacaaaggcaaatgttctttgtgataaggagcacagggtctcgagtggtcaaaggctcaggggacttcagtatcttccttcctttctgcccctcggggttgtggcgattgggagggccaagtgcctcgtagaacatgagaccaagctggtgtttggtgataccattactgtgttatttttcctctttaggactagaaggtccctgaagtgtaagcctagagaacagagnnnnnnnnnnnnnnnnnnnnnnnnnnnnnnnnnnnnnnnnnnnnnnnnnnnnnnnnnnnnnnnnnnnnnnnnnnnnnnnnnnnnnnnnnnnnnnnnnnnnnnnnnnnnnnnnnnnnnnnnnnnnnnnnnnnnnnnnnncccccacccccgccttttgtattatcttccccacccacatactgccgggcagggcaacgccttcttatccctggctgtgtcagaacagcagcctcagtcacccagacttaccctggcccttcagctcctctctttctgagatgcatggcttgggaggacccagaattcactttgtacaaattaggagcaaggcatgttccgaaaactcctggtgtattggctaagaaaagctcccccaggtaatgtaatgctctcagatgctaggttcttcgctcttacaggtctaggtgctgacccatactcgctccctctcccccctcctccctctctccactctctcactttcttgcacatatactggtctttggagctgctgactctacagtaggcccttggcaggcaccctctcgcccgcccgcatgccatcttggtgaatagactgtgttctggtttcgccttccaccttggagtctgcagactctgggcctctgttgcctcccctccccccgccccctcgcccaccccggggtatgaacatctcatatctccataggtattggacaatcagataaagaaggacctggccgacaaggagagcctggagaacatgatgcagagacacgaggaggaggcccacgagaagggcaagatcctcagcgagcagaaggcggtgggtattaagacaagccgtgccatcttcccaggaagaggttatgtacctgcaaggccaagagtcaccccgtttcatctggtgacatggtctctccatgatatcctacgaggtttataggtaccaggaagctttctcggaaacagcttcctgtcccaaaagaacagggtcggatttataaacccgaatggcagcctgctgcagtgtggtctttcagaactctggacagcacccaatgctgcccccagtctcccatggctcgatctctctttttttaattttctagtttctctcccttccaatgtaaacttgctgggcacaggactggtctgtgatgcttgtcaatctgtattgtcacagacctgtcactggggctctccacccccgaattaccaagggaaaggggggggggcacgtagctcagtgctcaagcacttgccttgcatgtataaggacactgggtttggtgccttcatcctctctaagggagggtcctgcctacctttcattttagcctccaccctcaactcctactgtttaataagttaggaaaatgtagaggaatatgttatatatgtacttgtattttgggtcagaagctcctaaaggcccgggttatgtacaagggacacggggatgtgaagaggcctgcttctatgtaaggtgcttctatgtatgcttctcactaagtggccttccacacaggccacttagtgagaagaccctggtttccgttggaaaaacagctgaatgccatccgccgggcaatgacacctgtgacgttcagggtacagcctggtggctcctctcattgcctctggccaacctatgggtttctaaggagatgatctgttcagctcccagggcccaccttagcccctctcttcatgtgcccgttcacgtgtgaggtgtctcctgtgtttcagatgatcaacgcgatggattccaagatccgatccctggagcagaggatcgtggagctgtcggaagccaacaagcttgcggcaaacagcagtctcttcacccagaggaacatgtaagcatgctgcatgcttccccaagcttggccacctctgctggcacagaaagtctgttcttttgtctggtgggagtcctaactggttcagtcccgtgcccagccttcctgtgcagacttgtgtagttctgctgtcctctgaagggcctccatcctcctgcagctcccctttgagtccggtactcttaaatacctcaagcccctaccggaccacagagaagtttgctgaggctaatggggctggttctagcttggtttggggaagctactgtccctcttttccatgnnnnnnnnnnnnnnnnnnnnnnnnnnnnnnnnnnnnnnnnnnnnnnnnnnnnnnnnnnnnnnnnnnnnnnnnnnnnnnnnnnnnnnnnnnnnnnnnnnnnnnnnnnnnnnnnnnnnnnnnnnnnnnnnnnnnnnnnnnnnnnnnnnnnnnnnnnnnnnnnnnnnnnnnnnnnnnnnnnnnnnnnnnnnnnnnnnnnnnnnnnnnnnnnnnnnnnnnnnnnnnnnnnnnnnnnnnnnnnnnnnnnnnnnnnnnnnnnnnnnnnnnnnnnnnnnnnnnnnnnnnnnnnnnnnnnnnnnnnnnnnnnnnnnnnnnnnnnnnnnnnnnnnnnnnnnnnnnnnnnnnnnnnnnnnnnnnnnnnnnnnnnnnnnnnnnnnnnnnnnnnnnnnnnnnnnnnnnnnnnnnnnnnnnnnnnnnnnnnnnnnnnnnnnnnnnnnnnnnnnnnnnnnnnnnnnnnnnnnnnnnnnnnnnnnnnnnnnnnnnnnnnnnnnnnnnnnnnnnnnnnnnnnnnnnnnnnnnnnnnnnnnnnnnnnnnnnnnnnnnnnnnnnnnnnnnnnnnnnnnnnnnnnnnnnnnnnnnnnnnnnnnnnnnnnnnnnnnncctgcatcgggctggggctgatcttggagtgcccactgcccactcacgcaagttgtaccttctcactctgcctctctgtctgtttaccctctgataattctctttggatccccctttcccaccccacccttaccaggaaggcccaggaagagatgatctcagaactcaggcagcagaaattttacctggagacgcaggccggaaagctggaggcccagaaccgaaagctggaagagcaactggagaagatcagccaccaagatcacagtgacaagagtcggctgctggagctggaaacaaggctgagggaggtgaggaggagggtcggtccctggagtggttttgggggtgggaggaggagccagttcaggagccagccagctttcaaaggtaagccagcatacagcagaggccttgcacatggtgactaagcattgagtctgggccatgtggtttcgggttcgaattcacttctacttattaccagttcagaaaatagcattgtatgtatacagatgcatacttacacacgctacagcgtgcctgaggcagtcggaggacaacttttgggagtttggttttctcctaccctttaggctctggggaatcaaacttgggttgttcaggcctggctgcaagccctttaacctgttgagccctcttgctggccccatcgttttctgttcataactaatatgcccatgcttccacctcctcatctgtgaagtgtcagcggtgacgttcctccctcttaaggctatgtggggggccgtgtaggttgatgcatctgtccaacagtggctgagcagtcagctcccccttcagcaggacttaatgaggaccatgaggtgtacagtacaggcaggggctgcttacaggcctacggctggggcagaggtgtcctaacgacgggagatgaaaggacagccaggcttctgtttgcctgatacagggaaactgggccgagctacgctttacggagaacacagcaaggcttggggacagttccatcaaagccaggaagttagatgcagctgcccattgtggatttgttaaggacctactgtgtgccaattagtagccagggtataatgtgctaatgtgagatgagtgttcctgaccttgggtgtgcatccagctaactgaccccaaactagcaagactggaaagccattcctgcaagtcagacacccaggcaggtgtggggatagtgcctcgtgcagggaagacacgcatatttatgatggggtttgtggaagagtgtactttctttcttaaggaagagactgcggtcgagaaggtgtcctcacagctacagatgcgggctccaaagataacataatcctgcttccagggccttccaaggtctggatctcttccgtagcatcacacagagcgtcttataatgtcttcccaggcatcagctttttattgcaagttctctgagacagagacagccctggctcagccttctgaggggtaccgtaggcgtgagccacagagcatggtttaattgctttttaaaaatggaatttggaaggtggatttgtagttaggtgtttttgtttgtttgtttgtttgtttttgttttttgttttgcttttcgagacagggtttctctgtatagccctggctgttctggtgtcctggaactcactctgtagaccaggctggcctcgatctcagaaatccgcctgcctctgcctcccaagtgctggcattaaaggcgtgttccaccatgccaggctgtgtagtttccttcctccctcccttcctccctcccttcctccctccctcccttctcttgatttttagacaagcgctttgcatgactgagaccctccttggagtgtgggaattggtctcccttgaatcctccactttatacttcattcttcccagaaaggtcagccttaggcctgtcagtgcaaataacccagacagacgctctcagcctgggcacagcagcagctgtctttgtctttccttcccagatctatctgtctgtctgtctgtctgtctgtctactgagcctgcgctgtgcggtggctcacctgggaagcagttcaccactttcccccacccccaggatggtaggagaaacttaaaatgtttcataagaggctctgtcttctccctgggagttttggagtttagctctaaatagaacaaggccagtcggtcttctctgggaggcatgctggtactgagattcggggcagaggcctcaacctcaagtcttctctgccttaaagggccctgagctttctccttcgcctctgtgtgtagtggtagctctttctatggccccctgggcttctgagcgcttgttaagtgcccagctctcagctgcctgatttcccttgactccctctcacccgtgcctcctggttttgccgaaggacatctggggaaatttggggcttgctggtagagtcccagcctgctctgacagctggcattttaatgagacaaacagtaagactttatgtttgcaaacacgaactcccaccatacttcctgggttcgagcgccaaccctgccatctttttattttgtatttttttttaaagctgtgtaacatttgcataattgcctgatctctccagagtgcagtctgcttatctgttatctgtagagtggaggtaatggtgacaccttgttcttcaagttcttggggagctcttttgagtgaccctggtaccattaatagtgtcttctgcagtcacaccatcttggttactgtcactttaggatcttgggacttctcctttgttggaattaatacagcaagttagcacattagcgatgaatctcctaccttttccttatagggtctcttctcttccgctggtgtgctggagtcactgacctcgctccctgggagatgcccacctggcagccacttaactctcttctgttccttgttccctgcccccaatcaaattagttgattgttgttggtgttgatcacaggtgttgttggtgaaatcttttgcagttccttcttctcttggctctggtgagctgggacttggatgtcaccttctctgaagttccttctttgctgggtcaccaccccacccccatcccgctgttgtcaactcttgtagatttcctgtgaggacagcaaacgtcccttactcatttggcatggtcctggaatggcttcatccctgctcagtcgaacctgaccagggccttgtgcatgctaggttcacgcaggatcctgtcaattctcactttttatgatttttttttaatgtttatgtgtttgtatgtgtaccatgcatttgcagtacctgcagaggccagaagagggcgttagatctcctggaactaaaacctcttgctttgcccttctgtgtaagtccatcccactgagcttgctctgcctgccctggtacctcagcctgtggcgtccccagagaagcttggtgcgatttgtcttggtctgtatctcctggggccggtggaggaggatgtcagatcccggggagctggacttacaggtggtgctgagctgcccctgatgtgggagctaggaatcgagttcgagtcctctgcaggagtcagccactgcgcctctgttgtttctacagcagccttccatgtccccacccgaccaaccgtcacacttgactgcagatagcaactttcctcttgctcctcaactcgaaggcacagcctgtctttcctctccgtatcctcctcgacacagaaatagctcattaaattttccttaagcaaatgcataaaacatcaagtagaaggatggttgttcgggcagatggaagaagggtgcttacctcaaaacatgacattattgcaggctacctaacaggaataagtcagcatgagaacgtctagaagaaatagcatccaacctattgtggcatttgtgttccaactgtgaaggtgtctttgtcactaatagatgttatttctgtccgtttacctttaaatgttctactcatctgggggactcattaggtttcatccgagactcccttgtctgccttgccttgcctccctttggaagccttcctaagcgtctggataagggatggtcagtagggcttgggctctaggactctgctcactgctacccaaacctgtagctgcccaaatgccttcggaagagagggaaacctttgcatagagcctctgtgcgtctcgtgtgtgctacaggccacagaggacaccactactatgcggttgttctctaagaagctatgctggtagagtggtagtggggcaagcctttagtcccagtccttgggaggccgatctctgtgagttcaaggccagcccagtctgcatagcaagttccaggatactgacctgtgtaggggaagaagacatttctgtgtgtgtgtaggccaacacagacacagtctctctccagtctctctctgaatattctcagtctgtagttgaatgaacccatgggagagctcactctacatcctgctgtatctctcagagctatcgatttctgagaagcccgaaggtggccccctctgcccaggcttagctgttggatccaagaccaggtcaaagctgcaggctttgcggcaggctgtgtcttcacagcctctctctctacagtctcctgagcatgtcaacccctccgcaggtcagcctggagcacgaggagcagaagctggagctgaagcggcagctcacggagctgcagctgtccctgcaggagcgcgagtcccagctgacggccctgcaggccgcccgggcagcgctggagagccagctccgccaggcgaagacagagctggaggagacaaccgcggaagcggaggaggagatccaggcgctcacggtgagtctgcaggcatctccgggagcttcaggaggtcttagccaggatgagagtaggcgccaggtgtctttgtttactcttagagatgtcaggagaaaggggaagaagatgattcctgggtgcggatggtgggtgggaaaatagcttgtgtagagagacttctcctttgttggcgttaatacacgagctcatccaggaagatcctcccccctgtgcacttgaaaaattcctcctgtgtttatctgttggtcctctttttaaaacgatcattgtcacacgtgaggttcattttggctagagtctatgtacttgggtcttctactttggtagataataatcagaatcaaaattaataatttctgtcccgcagtcatctacttccaagagcctattcctgggtctttttttttcttctttttttcctttttttgctttgttcctgcttggtctcatttgtattactgtttctttcaaggtgtatttctgctttatgcttttatcttattttactttattttgctgatgttttgagttgtgtagtcctgagtggtcttgaacttataatccccctggtctgtttcagagttgctgtgatcccaggtgtatactcccatgctgcctaggtttctctctgtttcccactttggtttatttttattcagtagttaagtgtgaatctacgctatgtgagtgcagtacctgcggaggccaaaagagggtgccagagtccctggagctgaagttgtaggatactgtgagccagcagacacacaaggtgttggaaccaactttggggcctccagaacttagttatctggaattgcaggacacagtcctcacccatgagccatctctccagcctcgatcacgtttcttatgtttctggtatgatgacggtgggaaaaactctcccgaaggagagatatcctctccaaaagcagtcttatcaaagttgcggtttctgagaaacaagctcaccgagcggggagagagccctcctgcggttgtacatgggaagccagcactggtctcacacctccattcttcctggaagacttttttggccacccccaccaccagcgaccattctacagggaccactccagggtgacaggcagagctcccagacagaggctttcctggggaacgccagtcatcagcttccagagcaagatgcgcctgctgagttgaccaggatgctctgggtgggtgatcctgacatcgcccacttcaggaccgtctgctcagaggacaccacccctgagggccggagagccagctccatgcttaagagcacttgcttctattcagaaggcctgcggttttgttcccagcacgcatattggctaacctccagttccaggggatctgatgccctcttctgagcttccagaggcactgcaatcccctccctgccacctcccccttccccaacacacacacacacacacacacacacacacacacacacacgtaaaggtaaaataaatctttaaggagagcaagcaagccccgttagaaggcttttggaaggctgcatggtgggcacagactctgaaagtggaatgagctctggtggctatattagacatgcccacacatttctcatagtaacacactgttcctgccaagcagatgggctcagtcatgcctgctggtcagggtgccctttcctgtgggcagggcacaatgcagctgatttattcagtgattttttttttttaaatggatatcttatcaattccaaccccacttggacgctcgccccacctacaccagctagtcagtcagtctttctgcgtctctcagagtagagtttctttctcggtctttagcatgggctctttatgacttagcttgtttggaaggtgtgtgtgtgtttgtatctttaaactagttttttccttacacgttgccgcctgttcttggatttaggaaatcccatcatttaaacaagattgagaatgtgatgttttagggacaggctctcgtggagaccagtgaaggccacagtggtttgcatgacagtggtgatggagcacctcctgtaagaagccctggacgtccttggttttctgggacttccgccaagcgtggatattgatcgagccctaaagttctatcatctctccgagaacactcattatgaagccacgtgtccacaatatctggtttgtggcgggggtgtgggggatagcagtgccgtctctctgtttatgctctgctttgagaacggattgaacgcagtttgtcaagacagaaagccggacacattgagatcgaagaggaaaacagaaagtaggtgcacggaagacaaaatgaacagggcaaggaaggacggaaatggccttggaggaatgtgtgccaacaggagaaccactattattaaatgcattgtgtcatctcctttccccctgcgtgagcatccaagctccgaagcgagcagacagacatcggcaagttgatccgtgggtgatgagcacttgccgtgtgcctaacactgtgactcttagccctctccccgcctagggaatcagctcacgattcccttttcttggcagtgcccaaagatgaggcatggatctcactgctctgcagggaccgggagggcaggcagcggccatgcatcttcccgtgcccgatggacggaggaggacataaaatagagcgtgcgtcactgccgtttatctgtgggaaatgagtcccttaaatcctgccccgttgctgggtggagggtgccgtgtctactggctgcctgaagcctcgcacggcagccagtcacgacttaatttagttggatgagatcactgcctccaagaatcttcacaaagaaacaaaacaaaagccttcgcttgcttgttctaaaaactcaggctctctcgctcttgcacatgatggtccaaggagcataggctgtgctcaaactcaggggagaagccgagcgggccagaatggcaggcaccccagcctgagagggcctgaggccacacagaagacccctgcttgataaagacagacaacggcagagatgcggtgggccaggcagctgttggcagacatgtcttccactcctgttctagggaagtgccccacccccaaatacctgtccattccgaggccccctcaccttttttcctcctcctcctctccatcctccttccccccccccctcctcctccctgtcctcctccccatcttcccactcctcctcaacagggtctcagacctggttctgggcatcacagggctgccaagtcaagatcttggttgacttgggacatggtcatatctaggttatcattgctcaattcagagaggccattgcctcccaggttgggagcagagcactttacctggtgcggcctccaccccgggaaaaatctgatggcactcagttacttcacagtcctccactgaaagaggttggcgggagcctctgtgcctgctcggtcccccattctcagttacccatcctgttgatgggttttgcactgagattgatggagattgagccgacacaggcacctgcagcagggttaaacttcagcagagccacgctactgaattttctatctgcgttccatccagaggatggcgctgtcccttcccgcgaggtgttccctgagagaagtgacgagcacctgagagagccagcaaggctttgcgggtggctctgtggtcctgaccccatttggtcgagagacttagctgaacagtgaggagccgaaagctcggggcactgatgaaaagttcctcctccccgtgcagcgggattcctgagcccaagccgcgtctttgatttgttggagccattaaccaagcaggccccttcacacaaacttcaagcctcgtatctaattagtcagctgttggcgtaatagccaagatgtgaacttggggcatgaaagtgcagaaaggatggaggcccacaggccgagggtcccggaaggcgggcacccgagcactgctgtcctgtcctcggccttgtggccctacaatgtttcatctgggctgctcttaacttcagttggcccgccctcagggccacgttctcttgactcctaccataggtttatggtggcttcaaagttcttgtcaatataaatactgtgctaagtaacttccacaacaccttccactgtagatcccgtcccaataactttgctcccacttactgagcatgtgaagacagccagagagggtcgctggccgttgggccaggcgggctgtggtctgctcagctcagcttgtgtcagtccctcccaacctctagctctgggcttcccaaacgggcccggggcccctgcacggtcctgaggtttggatcttttcagagcagtttcgtctggttggcatatctcactctgctaacatcttcactttccagggccctggtacgtttagagcatagacattcctgtagcaccagtacttaattagcacccagtggtttcactggtcggatccaaaccttggcttgggtacatcacttatttagcacccagtggttttactggtcggatccaaatcttggcttaggtacatcaccgtacctggacggacgctgtgtggttcccttttctcagcttaaaggaaacataactcaaaccattttcttttcagtttaaaaaaaaagatttattactttttattttatgtgtatgggtctgcatgtctgtctggactatgtgtgtgcagtaccgaaggaagccataagggggagctaaatcacctgaaagtagagttacagatggctgcttgctgccctttggtgctgggaaccagattcaggtcccctacaagattaaatgctcttaactgctgagtgctctcccgccccctctctctctccctccttctctccctggcccctcttacctgttcctttctgggattagctgggtggttgttagagctgatagtgacccccacagccacaagggatcagtttcctgttttgtggtcattgctcccaccacactgtcagcggcccagagggagctggcacctgatatgtccgagtgatccagaggccccatcatggtgagtttcatgggactgaatcacccaggacttctaagatttcagattccggtggggcaggtagatgaggttttaatggtatggagttattggagtctttgctgttaataagaaagtataacacagccaggcaatggtggcacatgcctttaatcccagcacttgggaggcagaggcaggtggatatctgagtttgaggccagcctggtctacaaagtgagttccaggacagccagggctacacagagaaaccctgtcttgaaaaaccaaaaaaaaaaaaaagaaaagaaagaaagaaagaaagcaaaggcggaggaagagggtaggggcgggacccatggtccatttcaaggtcacgactttagggaccttcttactagacccacagcaactcccagtagtgggtctatatgtggaaaacatcaagacataagtgtctgtctgtcatcgtcctgcctgaaggactcctatatagtgctgatctgcaggggatacgtccccatcaccctatgcatgccgttggcagccatcatttcctccttgcctggaagagatacttttgctaaagaacgctaggcaaactgatttttgttgcctttgttttctgtcacatggtttaaaatgttgctgtgttgtcctcaggcccaaccctcccacagcatcatctgaggacctgaccctcttgtcactctggactgtgccacttggaatttttgtttttgtcaacctgacccaagccagggtcacctgggaggagggagctgcaaactagaaaatgttcccatcaggctggcctgtgggcaagcctgtgtgtgcagcaacttgataactgactaatgagggagggcccagcccactgtgggtggtgccatcctctcggcaggtgggcctggttgtatgagaaagcatgctggccaactgagctttggggagcaaggctgcttcaatttctgcctccagtttcctaccctgcttgagttcctgccctagcttccctttataaagcaaacaaaccctctcttctatcatagtcatagaaactctgcccagggccgtctctgactggggagtctagtacggcaactgcagaccagagaaaccactccacccgtgtctggcttggtggaccagtgaatttattagggttacttgtagggacgtgggcagcttatgggcaaccacaccatcacgtttcctccttttggccatctcttactgctgtgcgttgtcaggggagcctgtccctttctcctgctccgtgagtgaggccccggactggtacagagagttgcccaggtccagggtggtgatagccatgcccaacctagaggatggccacctggcacttagcctgctggtctttcttcggcttgtttgatgagtttcttattgctggttttaagtggttggatggtgatgtcctaaaaaataactatctccgtgtttcttaggctggggttccctgaaggttttggacctgtgggttcatagcttatagcaactgtggacatttgtggccagttcttctcgaagcattttctccagctcactcctgaactccctcagaggctccagttaatttggattctgatttcagctgtcattctccctctctccctctcttcctctctccctctctccctctcttcctctctccctctctccctctctccctctcctcctctctccctctctccctctctccctctctccctctcttcctctcctcctctctctggttggttcttaaagggttgtcattgttgttttgttttgttttgttttggttggttgtctcttgtgttttatcttggatagttgctagtgccttcagtgctgtgcactaatcccctgtgtgcctctcactattataaatgtctagggagatggacacattagagagaacatcatagttctcatttcttgagttgcctgatagacttttatagagaataaggttttctttttaagaaaagggcttctttgggctctgcctgagtctagatggttctctgtgctcttacagctaagcaaatagtactataggccacagcccctctggcccagcatccccagggtatccctggcttctctccccccatacctttccccatgctgtgtcccatgtgctcacctctggtctctgccgccattctgtacccaagcaccatcagctccttcctgaccggcagccccgcccctcctccctgctccttggtgcctttcagtctggacctatatgatccctacaacatctcccaactcttaaaacatctgtgggagcacagccttccttcccagctgtttccagtgagcctcagatgccttcctagacattaagattttggtgtctgtccgctcctctgtttctgtcatgacctggtgtctgtctccccactttctgtcacgacctggtgtctgtctgtctcccttcctctctgtcatgacctggtgtctgtctgtctctcctcctctctgtcatgacctggtgacctagactatttctcccttttcttgttctgttgtttcaagcactgaccacagcacagaagaaaaggacatgcaagagggaaatagagtcatttttgaggttgatttttttttttccagaacctctcacctatatctgaattagcagatgttcaagacccttgtatgcagcagcccaaaccctgtgcacgtcctcttccaaatgctgtgaagagaggctgctgtgttgtctccagacagtcagtaccgatgcacaccctgccgcaccccacccccatccccacctcagctgtgacatggcttaacgttagcagggggcacatggtagaggggctgcttatttctggcaaaggttgggggagggggttgatgaagttcagggttccagtgtcttcttcaagcacatcccatggcttaaggctttgccacctcctgttagtgccacaggctgacaagcaagccttgcacccaagagcctctggaggacatttaagatccaaagcaatactggatctgtcttagggtagcgttgcctcaggaaagtctggcattcacttccaggtcagtgtcattttatgaatcagctttaattctcaaaaagcctctgcttttttcctgacgttgtgtgtgtgtgtgtgtgtgtgtgtgtctgtctgtctgtctgtctgtctactgagctgggaaggggtcagttggaggccaggctactcgtattttcagacctggggtcctgttttgaggcagtgaagaggagtgagaacactgctgcccctgggggctaatgtcaacaggaaatgatcctcttgctgctcacgatgtggtccgagaagccatactcacttcaagcagctccctgcggccggctacctgttgttgaggctgggatgagctgatttatcggttctctgctgtggcagcgtacctggctttccaagcaaactgccgctctctgggtttggcgcatagcgtgtgaaactgcgttcttccctacgaaacatttatgccacacctcttgcctttcaggcacatcgcgatgagatccagcgcaaattcgatgcccttcgcaacagctgcacggtgagtataaagatccggaagatgagcagagtaaggcagagggcagagggaatctcgggcttcctacgacagtgactgatcttccgagctcttttgcccttgaagaccataatgcttggttctgttttagtttttcgggggtgggggttgggggggagggcttaccctgttcaaggatgctaaagccatttaggtttgggaggggccggaatggttaagagtcagatgttcctgggtgtgggggcacgcaccctgtagaggtagctgaggcaggagagtggagagatcgaggcatgactgggctacatagtgagaacttaactcataatagaaagcccaaactgtttatttttcaccctcactcatacccagtgaatagacccggcagcttcaaccaagctctggagggaagctcatctcctcccctcccattgcaggagggcccagggcccatccaggcaaggcactgtccaaatgccaggggccggctttctatgcagcttctccagcctgtacgtggcctctgccaggagggagggccaattagttctcctgtggaccaagaaaatatatcttcctagcagagaaaaatctgcttttttttaatatgtaaattcacaacctcggaccctcgttggtgacatggcttctgcagagagttccatcagcagacaagccccagtcaccagttacataatctcgtcaagtcggtggaaaagcaggctctatttttgatgaaaatgaaggacagaaataggcccctttgaggagacagggatgctctccttatttgtgcttctgtgcctttggtctttttgtggctctctcactcctcagtggtcctgtccctgcttgtactatttacgtctgtgaatttccagaaacatcccctcccacgcatgtgtgcatctatctgtcagacttcgaaaggaccccttcccgactaactggggcattcggtcttgggtacactccgtcaaagtttgcatcttagctacccacagtatagccacagcatccatgcagctacaggatgtctcagcccacaggcggctcccacggctcacccgtggggtctctcccatgggcctggcaacggtctgctccctttctgtttccttggtgttttcaatgtgtgatgaggaccgcgtcttggctcgttctcccctgaagggcgtgtggatctttccaggaggaattaagccatcagggagggtccccatgcgggtcctttggtggatgtaggcactgatctctggtgatcaggggtggaactgcttggtcatgagacttgcttgcgtttgttaggtggtttggtctgtgtgtggatgtggtgggggatgggcctgcctccagacacctgtcagcttcctgctcccccttccttgaggaattgctggaatctgatcccattcttggctgtctagtacttttgctttcttatttttgcaccagtggttttcttatctctctctctctctctctctctctctctctctctcacacacacacacacacacacacacacacacagagcttatgagtgaacataaagtaacacagatccatgtagcccaggctgacctccaacttgctctctgctgccccagccccccaagttctgcagtttcaggcagaggccaccattctttctgtccctggaactctttgcaatatacttaaatatcttttagaacaaagggcctacaaagagaaagatcaatagattcagtccataaaaatataactctcttttttttattcgggatatgtcaacaatgttcaatgagaagttaaccaatgtgagaccctcaacagaactctctagagggattgtaagctcgtatagactgatagcgatcaattatctaattcatagagaaccttaactgtggctcctttagatgactaatccttccttaaccttggatggttttaacatgtatcagtcagttagtctgatttgtcccttttgcctaaagaccctgtttcacttcctttagtttcctagcgtaagaacttaagccatttttgtgtatggttgctgtggaccaggtaaggaatagactcgggaggtgggggtggggtttcaaagtgtgtatacacacaggaaaccaaacaacagggtgcgaataagaaacacagccagcacccttcaaatttgcccgctaccccggggagcctggtcgccatttatacaattggaagcttggccataagggaacctgcgggtatgtgggatgaatgtgatttccggcttaacttacataaatggctatactttctaaatttgatttctgcgagacagtgatccccagtgtttgtttcctttaccgatggcatttggtggtcaggcttctgggacccctttccaaaggtggcggctgtggtggggcactgacctaacaaagtcactccacacgtcagtcggaacggctggaagccacagtggtccgagccatgtcctttaaagtggcctctaccaggctcccatttccttgctgtaaagtggggctaacctacgcgtccttgtttccaacatgacattgatcccagctcacggctagtgtctgtggtttgggagctgggtgagggacgatggggagctgcctggttttgacaaggacttgacttccagaagccgcaggacatcagcacaggggacccctgggcattggaggccactcctccaaggctcccgccctgctgtcgtagtgcagtgcattctgggcttgtccctgggaggactaggtttcctggtttctcctgttgccttaagctcctggcgtgagctttggtttagagaaatggcctttctactttaaaaagcccagaaactactgcttcaaagtgtttagccataatcatgggcctcagtgacacagtcaagttcagtgtggctttcaggatgccctgggaacttgtcccgggtgtctcaccctctttgggggctgtccacgactgcccctgttactggtaagaaccccagaataactcagccttgaggagcgcccagttagattgcagaacactgggggcaggagacttccaggctcagaccatttctgtgttttgaaaggatctttaaaaaaaggattcgatttcaatctggcacctaaacccctccctaagtctgttttagaggggagttggtgggcaagcatatgacacagctttaattatgaatcaatctgtcagctataagattaaaaataaataatatgcaaatagctgccttggagaaagcaggcattaaaataggctgtcagtcccgagcctttcctgctgatgcctgttgtttggctcctcacccttccacgccattgctcctcttcctccgcaggctcttgctctctgtctcctggttgggtgtaaggggtcagcgtgcgcttctgtgatggtgaggctcacaaggtttagcttttttgttttgcttttgatgcagagtaggtagttttatattctctttctttcttagatctgcaccaagctctcttgtctacaaaacagcctacaagaaaacctggctggccccctgtgtgaggaggccgccccagccctgtcttttatttttatttatttattttttttgactgtgaaagtagaactaggctttccatttatcttttctttaagcctctgttcttggggcctaaactgttaatgaactcataaactgtgtcagtaaacaggccatctgccctcggcgtggaaagaactgactcatggtcacaaagataacctaaggattcttgcaagttacctggtccaaaagcaagaaggccaccagacacattggcacacgccagcagtcgcagccccaaggaggctgaagcaggaagatgttgggtttgaggccggtctgctatatatgtctcagagaaacagaaacaggagggggtttgagtagttggaatatccctgtcttctctgttccagagggcagcatcctgtagacataagacaacggagtctcgagtctcagggctgggctcaggttttgtcaggttactgcagcctttaaagtcctccatgacaacaggcatgaaacacaacacatactcctctctctccctctctctctctctcccccctctctttctctccctctctctctctcccccccctctcccacacacagcacgtatgctctcatacatgcatacatacagcatacatgcttttacatgcaggacacatgctctcacatgcatgcacacatgttctcatacccatgagcacatgcagcacacatgctcacatgcttgcatgcggcacacatccttttatacatatgaatacatttacattcagcacatatgtatgctcttacatgcaggacacatgctctcacacacatgaacacatgcagcatacatgccctcacacacatgtatgcacactgtacacttgctctcacacacatgaacacacatagcacacatgctctcacacacatgaacacatgcagcacacatgctctcacatactttgccctcatctagtcaaatgaggaaaatgaggcagtgacaagtacagaagtagagatcagatgctggcataacgccaagagacagctccctcaaagaccctatgacacagggaacagagggactcttccttctccagcagaactgcctcgatgatggaaaacccggaccttgtcacctcattagtttttctcgggtttcttcttcagctctttataatcttattttgggcagaagagaagagatgacagaaatgggctcataataaactttttttctcctgtgaatcaaagaaaggaagttggtacccaaaagcttaaatataaccttgaatggcaaggaaattatccattctctgtgactagagtttctgcagctaatctgttcctcaggagactttcagaatggagcagcattttggtcattagtttatatccctgtatctctcatgccacaggactcgaacagatacaaggtagtgaaaagtaaaagatgaagaatatagtattcttctatatgtattattacagtattattctatatgtcataggcagagaaacctacctgagttcaaactcacctggagttccagagtccagcaggcctgatcgtttgccccattctgctcattctcctcagggaaggggcagatggttaggtgagacgtttacagcataggccacggactgagtggcagggttgtgtgtgtagggtgaagatgggctgggtgcctgccactgtctatcttgacttggctgtggcactggaaggtgacagatgcaggaactatttgaggcaaactatcggtgtgtgtgtgtgtgtgtgtgtgtgtgtgtgtgtctagcacagcacatgattcttgttccaggtttctgagaaagcttttcatccaagatcctgaccagagagagggtccattgcccattcatagctcataatgtttctctaagagcacataggacccaacatgggtgtccatgttccaaacaagctactaggccagttccctccctgagaggctagcagcttggggggcaaaagggctttctggggtttgtcaaaagaatgtctttaatttatgctctttaattctgtgtacccacccaggaagacgtgtgtgtgtgtgtgtgtgtgtgtgtgtgtgtgtgtgtgtgtgtgtgtgttaaattgatcagtagggttgaaataaagaactaggcacaaaagcaatgctgacagatcatgagctatgtccgttgtaggtgtggaaacagttaataattgtaggcttaaagatgtttccttttcatttacttcttttttgtgtgtgtgagtgtaaaatttaatttatggcccacgtgccttattttaactattacgagaaaattacccttaaacttctaaagtattttatataaatgttctctgcgagcactgatccttaagcttcagcaaagagaatagaccagccaaacgcactgcaattgaagtcattctgccattgaacagggaaataatttagtaaaaccagattaaatctctcaataaaatgacaatttcatatacttggagaactcactgcatagaagaatccattaaagccgcatcgcgatgtggtattgtatcctccgaattacccaggctccccttaagagttcttccccctctttgttacacagaattaaattcactgcctgggattttattcaaatagcccttagttatctttcattgtgattcttccctgataaaactttatttcgattcccaaggctgtggccgtggcagtggtggtgtcctatgggctgtgtcaaggtctgtctcagtttaagtagatgtcgataccagtcggtcccctctccttgacctgcgttctcctccatgcctaattcttcctgctattaactggatctcacttgagcttggcctatccatttagttcttggttgactggctcttgccatattttctagatagacctcaaggtagagagaaaggagacatctccctgcccctgtgtgggctttaactaatgagttggcaagggagcttgggtttggcatcaggtcagatagctgcgcgttggttcccgttatcatgaaatgtgacccgtcacactacagccttccaaaccaccagttcaagacacatgtccttgccgacagtgagcttttctgatgcgttcccccccacccccattacgcccccaccccacaggtcatcaccgacctggaggagcagctgaaccagctcaccgaggacaacgccgagctcaacaaccaaaacttctacctgtccaaacaactcgatgaggcttccggggccaatgacgagattgtgcagctgcggagtgaggtggaccatctccgccgtgagatcacggagcgggagatgcagctcaccagccagaagcaagtaagagggcaggccgggccctggggttcctggaggacccttaggatttagaagggtctcggagggagggggttctgtctggggggagttccaggaccgggctggctcctacaaaggggctcctggtcagttccagttcatagccaagggttcaatttttaaaaacggcttataaaagtgggcactggggcgggtgtggtggtgcacacctttaatcccagcactcaggaggcagaggcaggtggatttctgagttcaaggccagcctggtctacaaagtgagttccaggacagccagggctatacagagaaaccctgtctcgaaaaacaagcagacaaaaaaaaaaaaaacaaacaaaaaaagagtgggcactggggctagagatgattgagaagttaaagagctcttactgcttttccagagggtgtgagttcagttcccggccaccctcattgggtagctcaccacagtctgtgacctccagttccaagggattcaacagtatctactggcctccacagacacataaataagaagaactctttaaagcagatacaattggattttaaagacggtcccactctgtggccctacctagctggaacttccaatgagctcttggccttctcctcggtgctgggagtttggacgtctccctcccctgcgactggctttgggttgtacccctcagatagatggtagaaccaggtgaccatcggtccattgtccccatctggtccccttgggatgtgggagaggaaaaccaaccgtctctgggttaggttaggaacttaggcttctctgaagcttgtctgaccaaagtaacctccaggaatccccgtttgctacaaggcacaactcagtgctcctgatttgcagacgatggaggctctgaagacgacatgcaccatgctggaggagcaggtcctggacctggaggccctgaacgacgagctgctggagaaggagcgccagtgggaggcctggcggagcgtcctcggcgacgagaagtcccagttcgagtgtcgagttcgagagctacagaggatgctggacaccgagaagcagagcaggtgggaacctcaaccctttgtagaagaccagtaccaggtgaccacccctgagtccccgtcccctccaccccccagagcctcgaacagggcaggcctctgtcctgggtttcctgagactgagctatcttctgggatgtaggactttcagggtgacaaccaggagaggacctcctggctgtagatctgacaagtgtcacctgtggtggtggttggcgtccttttattctgtgcagagtctccagaagtcaaggcaaatacagacacagtgctttcgtgtagcaatggccttaccaagattcctagcccagccatgtcaccacgtattccccacgctttgaatcttgctcccgaggaccctcccctcttccttctgttcccgacctggtgcctcgagttacctggggatcccttgtgatctgtacataggaggatgctctgttttgtagcacgagggcacatcttgcctggtttcttctcactggatgccagtagcaacttatttctcaagctgcaacatccaaaaaacaacccccagaagtcacccagcgtcccctggggtgagcctgggctggcacccactcctctctcctctctcctgtcccatccctgtcttttctcttttaaatagtagttttatgtatactcctgcctgcccagtgttcagttcctccctgctgggcccatctcagctcagggagctctgcttctgtcaaacatgccacctaactgaagaggctttaacgtcctgtttgtagcccatgacaggacacagctttattctaaccatgttatgtaaaaatgataagaacttattgtgaaccccgagggtcctgtctcactttctcacgtgggcgagcactagcccgtggcttcatgtgttttgtttatccttcatctctgctgataccagacccctccccccaagccccatgggtctcctgtcatctgggtaccctcatcagaccgtgttagggtcattttatccccatgatgacactcagtggctgtaggatgtgcaataaaataggctgtctgaacagtctgattactagcggagttaaaagagaaaagataggaagtgaacgatgtgaactctcagattgcaagagaaccagggagcaacaattgctttgtggggtattagggtgtgtggtgggaaggactgccattttaaaagcctgtctaggctttctaggctcccaggaagtgctagccacttcctccacagaccccttccacccacctccaccacccccaccctcaccgggttcttgtttgatattatgtagctgggcaaaatatacttttaaaatcattgtcctcaccctcaagaagccgacacccaccttcccttgtcttcccgtatttttagtgagaagtagatttgtgcttctggtggagaacagggaggtgtggcccctgggaggtggagctggggcaagtttaggagccagccagtgcgtacatcctggaaggccaagagtttgtgaagtagaccatcatcgcccaggagccagagtgcagaggcaagagtgcgcaggactcagatgcgggatgagaagtgattttcccaccttttacatttgaatttctgtgttctttagtggatacatttgtcaggttcagccttttaagagaacttagaacccttaggcctttcttgtgctcactggggagaagacgttcactagaactcaagtgatctcccatggtccacttcacgccctggttccttggtggcggtgtggtagaggggcactccctgatctctgccccacagggaatctgggacgctctagacccatccccattcagtccggttcatttgagaatggctttttcctcttcagcctttccagtcggtccccacaggaactttaccgccgcagggcaattttaacccaagtctgaagtgggtcagatttttgctctgtaagctgtcaggaaggaagacagcgtttaaaggtagaatccacggttgggattccatccaacaacctgcagcctgtttagaaatgggccaaccttctccctctgggtctggggcctggggcttctgacagcaggcctgtgcttctctgtcagggctagggccgatcagcggatcaccgagtcgcgccaggtggtggagttggcggtgaaggaacacaaggccgagattcttgctctgcagcaggctctcaaggagcagaagctcaaagccgagagcctgtcggacaaggtcagcacacgcccctttggctctgtagggaaacagcttcatttcctcctttaaaggcaaggttcacacgaattcagacacagcccacagtaaacatatttcaaaagcatcccgttgcttactctagagatgacagatatgactcaccgtgggcattgttggttggcagtggcatagctgggtgagctgggtgttggggttatcctggttggatggtgagttcttaacatctaccgccctgggccccaaaggtccaacactgggtacacaacactgttttattcctagaaggctttataagcctcaggttttcagaaaacatggtgacagtgactgtctctttcagggtgactgtaggcagccacgttcacggtgagtcttgtgtagtccatttcctgcccctagaaccaagtacttgagacaaggtaatttataaaggagattatttggctaatagctctagaggctggaaaaggcccaggtcacggtactagcatctgttgagagccctcttacgtgtcagaacggtggctgatactgagtttaagaagtcactaatgcctgtatgggggagcctcacccttacagcctcatggaatgctaatgtcgcccagaggccccactttcaaatgtcacttacatgtgagttagattaaatgtctaatacaggaattagaatgggggcagcattcagaccacagtagggggagtctaattaagcacacctgtcctcagcatcttgcgttaggaatacttgtgttctgtctgtgcccctgtgccctgtgatccatctgcacggatgcatcactgttgggtggttttgtctaatagtaaactgggaagatgtagaacaagtgcttgagggtgacagatagcaaccaatgtcagaggcacgttactcgcacatatcccttcttgtacgtgtacacagaaacaggcgatctgaaggctgcacttataaagaacactgacgtcatgtttatgaaaggcttatgtttgttactgagggctgtcaggaaaataacaaaagcacaagaaacttgaaagaagaaccagccggtaaccatgaccttgagtggtggtggtcttgtttgcagcctctgtttgctcattctggtgtacacacgcacatgctcgcacacatgcaggtgcacacgcacgtgcacacacttttcaaaataaatttaggcttttactatttataggctgttccatctttttgttttttaaaaaaatcatgtaactggaagcttttcccgacttattaaattttttttaaacatatagttttgaaaaaaaacaaaattgaagtcaggcacctaatttaagcattgcctttgtacaggaaatttgggcttcctccaatcttttttcacatatgaatagcactcaatgaacataaatctttatggacatctgtgattattttcttcccggaagttcacagaaacagaaccactggactcaaggctgtagcttgccgctcaaggatagttctgactcagagtctagctggctagggtttttaataactttaataattttttaataacctgaggaaagtacatttattgtctggagacaaatgaacctttctgggttcaatgctgcttttctagttggatattagtatgtattagccgactcctgtctgtccagatagtccaggtccattttatcttacccgtttctgacaccattttctcttacatcagtcaacctttcttctgacgcagcaggctgtcgtccttcgtggctatgccttgtggtagccaccctctctgcctttctggcccagatataagatccttgggaggagttgaccatctccccatcaacatgtaataagccccaagaatatgtttatttaattaaattcagacaaagtgtggcaggcaaattgagcagccacattcttaaagcttgttctggtcgggcagtggtggcgcacgccctttgatcctcgcacttgagagtcagaggcaggtagatttctaagttcgaggtcagcctggtctacagagtgagttccaggacagccagggctatacagagaaatcctgtcttcgaaaaaccaaaagaaaaaaaaaagcttgttctggtgacacagggtttcccgtgctcacgtctgtcacgtggactatttgttctctccccaaatgaaaacttgtgacttttataccttggatatctgtcacgtggactatttgttctctccccaaatgaaaacttgtgacttttataccttggatatctttatgtgtgaaggtttagggacatctcaaaaaagtctgaagtctcttaacatacccaaatgtaccatcatgaccaatttttccaaacacacagctcaacgacctggagaagaagcacgccatgctggagatgaacgcccggagcttacagcagaaactagagacagagcgggagctcaaacagaggcttctggaggaggtgagtgtgagccacctaggtggtgacacctgtgcgtgagttacatacatgtgtgtgacatacatgtgtatgtgtgcacgtgtcacatacatgtgtcttacatacgtgtgggggtgttatgtgcccacgtgcttacacatgcagaggacagaggaagcatgttggtgacttgtctgttgctgtccactttattaccatgagatgcagcctctcattgaaatggaagctcggcattttggctagactagcaagctcaagaaatctgggtgcctctgcctccaccctgaggttccaggcccccaccctggggttccagacatccacagctacacccagcgtttgggcgaatggcagaggttccagctcaggtgctccttcttgcataggaagaatttttttacccactgagttgtccgtcccgtcccgtcnnnnnnnnnnnnnnnnnnnnnnnnnnnnnnnnnnnnnnnnnnnnnnnnnnnnnnnnnnnnnnnnnnnnnnnnnnnnnnnnnnnnnnnnnnnnnnnnnnnnnnnnnnnnnnnnnnnnnnnnnnnnnnnnnnnnnnnnnnnnnnnnnnnnnnnnnnnaaatctgttatgttatattcaggtgattggagccaaattagtacattttagaactacaatttttgaggtagagtaaggggagtgtagaacactttctaaagcttgacacagtaagagtgtctctcagaggccagagcatctctggtgcttgtgtcttccgatgtgacacttcatcacagtaagtatacgcccaacagagaggttcattgagcaatggctgagtgagtattgagttggattgtctgtagagttgacagttaagttcggagttggtggaaggtccatgccgattagctccctacacagggcaaaagcgtggccagattttaagtaccaaatgtcacgaatggcttttgaacctggacttaattcagttgaaaaagagttctctggatcttgagactcggggtgccaagctgaagctgctctcccagcgcacccctccttccgttccctggcttttctcctcagaactgagcattgctgtgtccattggtgaggacctcctttccccatccagagtctcccgcccagagtcgcagattctgccttctcacttagcctgacctccaagggcaaatgtccttcctgttgatacccagtgaaaagatgggctcgagaaggctctgtccagaccccagtgagcctcatagttcagttagccagaatcccaggataatcaacatggacagagctctccgggtgccctgctggtggctgtaactgggccatactgttctgtctgagggaagtagggaaaagatttcggatctcagtctgcttacacacggtgtcttataaaatcacaccttaaaagccatagctgggcgcttggggaagttctggagacaggtggtagtgtcaggtgtgcagcagtgtgttcgtgtgaccgtccttaatgccaccaagcacactaaaatggggggtggggcgatggcacagctggtgacctgcttgccatacaacatggggtctacctgggttgggatccactgtggtgcagtggcttgtctcagactccagtgctgcggaggcacggcagaggcatttcaaagatctcttggagatgggacccaagtataaacatgaaattcccccttacatcatatgcgccgcacatacatagagcaggagtgatgttagaccgttactgcatgcggttctggggcttgaacccgggactgggtaagcactctatcccaggctgtaccccaagtctttgcctggtggttttaacggcccacgttttgactgtgcctatcacatgagatcagttgtggcatttttctactcaagaaattttgggattgggagcatttctaaatttgggggtttgttattgcgagtgcttgacctgcaataggacccgtcaatctgccaggtggtcctttctctgggatgaataggcaatgttcccccattctgttcccgcatgtggggaaacagaagcaggatagacataatcaaggctcccgagtgtcccacttcccatctgcagagggcaggctggcccggacagctccgcgcttagtccaaggttacacggtgactcagtggcaaagccaggaatagcatgctgaagcctgactcagccccaccttctcactcgggctgagaacactccggatagatatttgaatagacatctggccaatatcgatctgaactggaactctcacacatcatcaaaaaccattacaaggcaaaaaaaaaaaaaaaaaaaaaaaaagtaactcttaccagtcagaacatgttgggatgctgggttatggtgtgtgcttcataagtttggccacacccaaagggctgtcttcaagggacagagactttgaaaagagacagactttggaacttttaatgttgcccagctcaaatccctctcatgaccgactctccctggcaggttttacagtggttctttctcccacctcagccctttagaagtcctgctggagatgagggttcattcacccattggtttgtttccgacacagggaggaaggtccccgccccagctcgtcacacagggaacatggacatcacttccttgtttccagcaacccttaattcctagaaaatccttttcttattttgaaaagcatacggctgccaagtactttgaagctagtatagtatcaggaatcaatattaatagtcaaatttgcttttattcttattgacgcgtatgtgcctgtccgtatgtgtgtgggtgcctatgggagccagagaggacattgaattcccctggacctggagtgataagcagtggtgagctgcctgacgtggatgctgggaacagagctcatgtcctgtagaagagcatcaagagctcttaccactgagctgtctttccagccccacgctatgcatgggaatgtggcttttctggctgagttgttaattgcccaatgtctaaagggctggggtccaacccccaacagaacaaaagataaaagtccaacatacacaaaacaaaaacaaagaagtcaaaaaccaacacacacacacacacactcatgaacaacaaatgtctgtcactaacacagttaccaggtgtcttagtaccatgcatgaatttgtttgtattgttcttgcaggaaccccatgggagacctgtgttctttcttgtcccctgcgtggcactagcatggtctgtgtgtgctccttatgtagtgaaggatttccatctctcgctccagctcagcaaatcctgacagtcacttggctctttgagttactgtgccattgaggcccttaacctacgaaatcatgcctgttggtccacaaagtttgtcctcgagcgtcttcccaccccatacttactcagctgatgttgtgaaaatgccgtcctaccaaaccgtttctccttcgctccaacccatccttcctgctccnnnnnnnnnnnnnnnnnnnnnnnnnnnnnnnnnnnnnnnnnnnnnnnnnnnnnnnnnnnnnnnnnnnnnnnnnnnnnnnnnnnnnnnnnnnnncacctctcagtttcctgtcgctctcataaagtgctcgggacaggtctaagcacatcaccaaggtccacgtccccagggagccctggcccacaagcacaccccgcttagtctctctccgggcagcagatagatagatggctttgcgcaatagtccacggagaacaaagatccctttcctctggctttgattatagtaaataaacagcctgtttcccggcgagccagtggagcatggatgtgtttagtgtaaagaaatatttttggcccagctgtcaccaggtggatcatttgtgcctgtgacatgtttctcttggttcctgcttgctaattaatgtcctcctaaaacagtggaggaaaggaagggaggaaatcacttgaacttcacgggaccaaaacttcccttcaaggcagcgtccttcttaactggtttctttcttttttaaataggactttgctttattttagaatgctaagctatgcgcctcaggagtgacttcgctctgtgttgggtcagatacatgattgagccagcctgcaggaggaagtgtttatttccgctcagagcttcagaggaactgtccatctttgcggggagggctttagaggggtggacaccacggcagccaggaagtggcgagcaggagacggagggttcatggcaagacacagtccccaaggatgtctggcttccacgcaggccatgcctcctgtcacttagcccctcctcaggctaccagtgtcatactgggactccatcaaaggtccaccaggccagagtgcctaagatctaacttcctgggaactcagctccaagacacccagatacgcaccactaacccccttccctcaaagccgagcattaattaagttgagccatctcgggtgctaagtgcagctgggctgggctggcaagaaaggcagatggggaagaagagaaggaagaaggacagacacagactgccaacatctacatgagcacctactgtgcgtgacagacactgtcacctggggaggcagggtacaccatccactcgggaagaaggaagcctgggcactgcagctttcgtgtgacagagtcaggatctaagcagggtccagattctacttaacacagctccatgcctctggcagtcgttaccatagagatggggagcaaggcacaggcaggaagcagggaatgaagagggccagggccagccagctctgaggccactgtgcctctcactctgtgggggttggggacttggggtgtcagccttggactgtttgaaagcaccaacgatgatgtgtattttgctttcttaacttgctttcccttagtctgcagagtctagcccaccaggaaagactgcagtagctgtggtgacacgatcacctggggtacatgaaatcaaacagggtctccctggacggcacacatttagacaggagctgcttgacttacgttttaattagattttcttttttttttttttcaacacaaactctctccagtgaaaccaaatttttttccttgggtttgaccagctcctgttgaatagctaggtccttcttcctttgtccccacactgtagaaatacatcctctaattgtggctatttatatacgcagggccaaccttcaagttagggctgatgtgacttggtgtgcacaccaccacacacagcctgtacagtggcttttctgatcacccactgaggtctaggacactcccaagtggaacaaatggagctgattctcactgcttcgctaccagctctgggctgtgctctgaggtgccaaaatggctgcctttgtaacacagaatgagcgtgggccaggacatcagctgccttgcagtatgaaattacaggcatgtggccttcaggggagtcctaggaccctctttttcagctgtgtcctcctgtcttggaatagagaccaaccagcaattctgggaggagttgctctcacaagggaacttcctgcatcactcgggaagtcatttggggaacgggatccggggtgggaacggagcagcaccgtgtgtgatgtcaagccttttgccatcccctccgtctcgccagcaagccaaattgcagcagcagatggacctgcagaagaaccacatcttcagactgacgcaagggctgcaggaggcgctggaccgggcggatctgctgaagacagaaaggagcgacctggagtaccagctggaaaacattcaggtgagggccagcagggggcgctgcggacacctgctgcctgttcctgcccctcccactcaccctcctccctgtctcttcccttctcctcagccacccccagtacttctttgttactgtcctttggttgtttggcgctccacattcagtcagggcaggtaccatgacccacggagccaccttgctttccctccttgaccactcatgttcttaaagcaccaaatccaaacgtaacgcttccgcccgcctctgaggccgtccttgttcccgcggattttaggttctctactctcacgagaaagtgaaaatggaaggcacaatctctcagcaaaccaaactcattgatttcctgcaagccaaaatggaccagcctgctaaaaagaaaaaggtgagttgtgatgcccaacagccgggggcaggcgatctcgctctgcctcccgtgactcagtagctaccactgtgactagtaacctcacaaatgaaaaaaaaatgtacatttttgtttgttctgggttgagaaccccgtctaagtctaaccagagtggcctttatcacgggtgaccattgatcaagaccagcagataaccgctctgtaagggagtcttgtgttctgctcctgcagagaaagctgggctggagcagggggtcatctgccgagggaacgggcttctgcacaggttgaatattaggtctgaaggtcacgtgtgtctgagagtttagcaggtcccacttcctgggactctagggcatgtgtcacctacgtgggtctccaggaagcactcaggattgatctagtccattgctttttatttagcttcctgcttgggtcccttttgagacacagttttgcagcgtagctcacgctggacttaaaactcatgatgttgcctttggagcactgggattgcaggcgcgccctcccatcatcccgtgcagttaaatggctcacggacacaggaagttaaaatggcctgctttaaaacttgactagacagctctcttccccagcgccatactctgctttaaaccataacaactggtgaaaaccaggatgaaaagccagctgtgacatatgaggccctaggctcagtcatatgaggggtggtggggagagattagctgtggcccaggtcatatgagggttcctgtgaggagactgcccagtccgcaggctccccaccagctgcagctctcgccctaagttgttggccagctccaactgagcgccaggaaggtttcaaagggcttggcatttcctcccaagggtcttagcacactgtaacaatcatggcagcagtgttaaaggaagtcagaggaagggaccaatggaccaacaccctcggttggcctcttcgttacccggttcctgtctgccgcacacagtcctccaaggctgtgtctcgctgtgctggccacgggagggtcttttcatataccatgttatcatatattcttgctaaagctcacgatatttaatctttttttttttattctggcagcggactattgtctggttgtgttgttaatgttaggatgttttgcgttcgttttcctgttaattctttttttttcttttgtcagacacgtgattccatttttttctcttctgtgtacagtaactttctgttggtattttttttttagtgagccctttgttttgatatcatcttagcatttgtttttcaatttttgctttctttaaaaaaaaaaaaaccaacccataaccctccccctccccgtgtcttgtcactaagcaccatgagacaagttcaaaggcaagacggacctctgaaccatcaccacctctcccagctccatactccatccaccctcattacattttttgaggggcaaggactctcgggaaatggctctccagtcttgggaatgctaaaggacgaggtggtggcagttgaagcatctttaaccttcttggtgaaaacctctgcaccgctccttttgtttttttcagctgactggaatgggctgaggctcagcctcccctcccccctccccttcatatgccattttttccccaaacacacttacagtgagtatatgcctggccttggtggcttgctcctcccgagtcagctctcctttagcctgggtctcctcggtaccagtttctaggagttaggagatatctctgtttccattgctagggtttatttagtcgacggaaagaggaccctgctttgcccacacaggttcctctgcagtacaatgagctgaagctagccctggaaaaggagaaagcccgatgcgcggagctggaggaggcccttcagaagacccgcatcgaactccgctctgcgcgggaggaaggtaggaactctcagaaaaccttcaaaactacggagcaggcggaagaccattccccacgagactggccaggactagttgagcatctctgcaggccacgggttttcattccaggcgtgtccccagcctaaaagttttgcagttgcagagttagcacaacatctgcccttttggtttcgggtccttgaaagacaactgcgggcaaccgtcttagtctggtgccctaggtggctaagcccccattgaaaggccttgtaactggtgtctccacagctgcccaccgcaaagccacggaccacccgcacccgtctacgccagccactgcgaggcagcagatcgccatgtctgccattgtgcggtcgcccgagcaccagcccagtgccatgagcctgcttgccccaccatccagccgcagaaaggagtcgtcaactccagagggtatgctcttgtcactgttttctactgttaaaacatctgaaaccgggtcgtttataaagaaaagaagtttgttcggctgaaaaagtcaagagagtggtgccagccagcgtctcccaagggcagagggaaccgtgtagctagacagggtgtggcagcccaggtcatccctgttcttgtaaacccagtgcagtcacggggagcctgtcgtcacggcaccagtctaaggttactaagtcttcttccctgtctgttaaccctgagtctgccgttaccacagtagctcatgttaatagtcagtcccagacctggtaagatgatgtttcaagaacacgaaacagtcaggtggtgcacaccgctaatctcagccctcaggaggcaatggctggtagatggctgtgagtttcaggcctgccagggctacacagtgaaaccctgtctaaaagcaaccactgtgaacctgagaaaactaacctatattccttaggtccacttttagaaatctcaccaatgtggtcctacatgcaacctgcgagctacgtcggtgttatttaaagtactttgaagagtgtattagatgtgctaccctctggcaaagaacttggcagtattccgtgtatgggtataagagtcccctaccaaaccagacctgcccatgctgccacagcaccttacaggatatcctgtgtttctgggcatagctggggagtgaattcttaggaaataaatgagtgggtgaaaggttaaggtcacttcaaatgtgaccaactggcggccagttgctagaaccactgaccatgtaaagggtttcctttgtggtctcaaaagtcctttttgtcacacagaaacaaaaaggacttttgaaagaggtgaggaaggtggtttgaggagccttggggaagcagtggcgagctgccaatcagcccctggctccctgccagccttcttaggttgtaaattttgatgacacggccttgttgctatgtttatgggccactttggtcagaatgcttaactctaaaagtcttccagatgggaaagaaccatcattgtctgccaggtgttcattgtctgccaggtgtccaccaacaggtatccactgacaggtgttcattgtcaggtgtccaccaacaggtgtccactgacaggtgtcctggagcaggtttctgctcaccgtggcttcccatgtccctgctggtgtgtatcataccctctgggtattgctgtgcgcatttgtgtcacatcacatcactgactactcacaactttctgagaaaagaagagggggcgggctcggtgagaagaccccagtagagctgggtttggcgtatgttctgagcttctcactgtaaagttgcctctgggtcactgttgatggagagccagataatggggcatgagatggggaatagaaatgtaagactcagttctccagacgtaaaaagttttgaaaaaaggtaatttgtgaaaaaaaaaacctgcacgttaaaagaattcttcagtcagttcttaatttaataacaaattctgcagttcataattactacttttaaactgaattctgtgaaaagcactagatctatctttcatgactaaatgtttacaaataagtagagctgggctggtgggacacaccttcagtctcagaattctggaggcagaggtggggacaggcaaatcacagtgagttcaagccagcatggtctacataatgaatgagttccacaccagccaggactctatggacaacccctgtgtctgtccgcagagagtctgcatctctccttctccccacctctggggaccactaatctactttccctctctgtggatctcccatccttagtctctcaaacacatgggctcgtactccacgcagtcgtctgtgactggcttattttccagaacacagcgttctgtgggattcacccacactgtagcgtgtcgctgccctgctggtttcttttctttacacggctaaataatatttcattgcctgggcggtgcatgttacctgttacgctgcagagggtgtttgagctgtctctgcttgttggctgctgtgaaccgagccactgtgagtgatgtgtagttttcatgtgggtgggtgtatagcttctgtcctcttgggcatgaagctaggagtggaaattgttggaataatgtatacctcatagtctatagcttttggaggaactgtcctcctgggccctaaggtaccactttccatgccccctcccccagggatgtgtgaacaatgccatttctctgcttctgcttcgaccctggttttccatttctgactctagccgttttagccacatggcaccttgctgtggttttaatttgcatttttcctaaagcctaatgacagctagcaacttttcaggtgctttgggcctgtttttcctctttgggggaatatctagtcaaagtactgtgttgtgagaactcctaatagcttcttggaaccgatcttagcagagaccgtctctcttgtctcttggcgtctctcttcacttccggctaaccatttttccccccttagaattcagccggcgtctgaaagagcgcatgcaccacaacatccctcaccggtttaatgtgggcctgaacatgagagccaccaagtgcgccgtgtgtctggatactgtgcactttggacgccaggcatccaaatgcctcggtaagagccgcagctgtgtgtccgctggacacctccatgtcttcgtcgggaagattggtcaggtggaggcgatgttctaaactgtcgaatgatacattcaccgccaaagcttttcccttcagtgggagggaggaggctgcttttcctcacgacccccacgtcagtgtgcaaagtgcctccacctcggttaattttcaggcagcttcgaatcaggccagtcagttccctgctggcttgaatgtcatgaacatacaagcatgttcctgcacacggctctgtgggcagcgtagcctgaagccaaaacctgggccaagggcagtggctgtctgtgtccctgttggtgcttggcacctggggaagtatcaggatggcctgagtgcgcagcttcccttgcagtcctgctgggggcggagaagctcggggcctgcctggaagcccgctgcgtgtcttcaggttctccgttgctcttctctagaatgtcaagtgatgtgtcaccccaaatgctccacctgcttgcccgctacctgtggcctgccagctgaatatgccacacacttcactgaggccttctgccgggacaaaatgaactccccggggctccagagcaaggagcctggcagcagcttgcacctggaagggtggatgaaagtgcccaggtaccctgcagggtggccactctcaaggcgggcgctggccggaggggtaacagggaagtgtctttgaggtagcccctcccgcttgcttctccattctgagacatttttctctcgtccatctttcttcccccagaaataacaaacggggacagcaaggctgggacaggaagtacattgttctggaggggtcaaaagtcctcatctatgacaatgaagccagagaaggtaaattagtcattcgggaaatgtcattgcgtggggctaacccaggcctccgagtgttggagtgaatgaagaaggctttgtgtttaatgtttggttttatttattaaattattaattaattaattttttttggactgcctcacaagccttctctgctttcccaattttcaaagttagaagccaggtaacttctctaaaggttattggtgcgatactcgatctataggtctctcccttgaaggacccgcagggtgctgctgccctgaagatcccacctgctaacgcaccagagagcttccgcctcagtgaactagccacaaatccgcagcggcatcagaaagctgactgtgccctcatctgacacactttatttatttattttttatcttcttcccctctgccttgtctgcacctctttccgttctgtgtcctcctgcggctctttactacgtgcctctgccctcctctctcctcccctcctctcttctcttctcccctcttctgctctgttctgctctcctctcctctgccctcccctcccctcccttttctcccctcccctcctctcctctcttctnnnnnnnnnnnnnnnnnnnnctcctctcttctgctgtcccttcccctcctctcctctcccctccctgtctctcctcttctctgctctcctccccctcccctcctctcttctcatccctcgtctctcttttctctcgttcttggtcctgttcttttgtttttctttcccaccttcctctttgcaccaagctggacagaggccggtggaagaatttgagctgtgccttcctgacggggacgtatctattcatggtgccgttggtgcttcagaacttgcaaataccgccaaagcaggtgagtgggatccagaagagccccgcccaggaggcgggctgggtttgacagactgagaggagcaggatgctctgccaaggagggaccacccctgcccagtcccccatcttagcaggaactcaagctgcagggtctggtgggattttgaggctgtgacatcatcagccagctctgttggggggtggggtggggcctccatggccaaccctgtgctctctgaaatcttgtagatgtcccatacatcctgaagatggagtctcacccacacaccacctgctggcctgggagaaccctctacttgctagcacccagcttccccgacaagcagcgctgggtcaccgccttagaatctgtcgtcgcaggtgggagagtttctagggaaaaggccgaagccgatgctgtgagtatgggacccttgatgtgggttggggcttctctgtagggtgcatggccgtgggcactgactttatctgcggggggtgggggtgggggtcccctactctgaaggctgtggtgagggtcctgactcgctttgtggtgcagagcaggggcaggggaagctgccttgtctgcctggagcaacctcacagcagccttggcctttataaggaagcccctcctcctgtttaccccctggggtcctcgagttataagtactttgactggaaacccctgaaggagatgccagtgtgccggtgagcacctgtgttcagggaagctgcacacagtctgtccagatgtccctgcagtgtctgctctccgcaggcaggtctgaaatcccacgcgtccttaagatgtgacaaacattgctgctatgcctccatcggcaccgctccccctgggaatatccccgggtgcagaccgtgctcatcactcactggcgttggcttcactgaagacgaagcagcactttctagacacttagcaataggagggttcttgactgtgagcctcgggaagaattgtgtcctgttccacacatgagcctttttttctgaaatgtgccttaatgtgtgtacaataggcacgtgaccatacttcgagtgagcatcagccagtgtgggttgaggtaaagagaactagaggcttggcttgctcaggactcccgagcttgtgtgttcttgtcgcagctggaggtggggaaggggccttcctaacagcttgttaccgctccgcacctttatcttaccatttcctgtcacggcatagcatctgtgcctaggtcacccacttgtgtgtgtctgcaccaagctaatttagggctgcactggaggagccattaacagtgacctggggtttcagtcagaagttgtggccagagcccggggtcacagttgagagggctgagcacttggcctggtgtctgtgagggtgtggtccaatgtgtgcctctgagcgtgactttaggttactgatcctcgggagggcttggtcacagatagtttgaatttactccgccccgtcttttctgtctgctttcacacatggaaagaaattacttggaaactctctgctgaaactggagggcgatgaccggcttgacatgaactgcaccctgcccttcagtgaccaggtaggtcacccaggcagcaggcacagtcggtcagctgggaccacacgctgtcaggatgggggcgggggtgatggggggggcgggtagctttgctgctgttgagtgtggggattattgcggtgtctggctcacgctctgtctctggacctctgccctggcaggtggtgctggtgggcacggaggaaggcctctacgccctgaatgtcttgaaaaactccttaacccacatcccagggattggcgcagtcttccaaatttacatcatcaaggacctggagaagctgctcatgatagcaggtgggaggcctagcatgcagcctcgcggttggcttttaggggcagcacgcggagacccgagcgagtgtcgcactggagatgcacagaaacaacctcctggtggcaggctggaatagtagcgtccctgtccctttgctgtgtgtctctgccggtgccaagcctcagctgataagcctttgtccacattcggttccctgtccatgtctactttaccagcctgacactctgaaagaacactgtaccatttggccacatgcagcacgctctcatttactatgacgaaatgcctgagaccaggcttctgatgaagaaaagaggtttatttaccccacagccctggaagttcaaaatcctagagggcaacatgcccgcgtagtgaaaagttcctcttgtctgcatgacctcacccggagagcgtgcagctgggagccagtagattatcaccacacaggaacactggatagccaaggcttgctccttgatagagcctctcctgagctcatgggagctgctctctgaggcctaacacctcctgttagaccctgggtgggcctacgtctttacttgtttaattttatgtgtgtgtgtttgccctgcaaggcctcacagacttgggtcaagtcaaactttgtttttgtgtttgcgataggctttcaggttgcccaggctgaccctggactactgatccttctctttcccacgtgtaggaatactgcgactatcccgtcaggccctgtgtgggctgggacctcccgagagctcgcctcctgccctggaggcacctgtgatgtggttactacagaatccttcctgtgttcatgtgtgcccagacccctcctctggattcatactttccaacatttagctacacatttttcctttctgaacacgtacatttacttatttttttttaacatttgaattaactgtaggtatgaaccccaaccaagtccgtcagcgtatgaccctgcgggccctctgtcacacgtctgtggcatgcgtcttctttttaacctcattacttgttggcaggactttttttatttgcttacttgcttaggtttttgaagtaggtgccccaggctagcctcggaactttttacgtagctgaggatgtccttgaacttccgaccctcctgcctccacatctggattggttctcatccctctgtctctcacaccttggacacatctgagtagctgaaccccttcattgttccccaacacattcttccacattccaggaacatgtgtgaaattctctagggttttttttttcttgcaaaattatccccattccccaagaaccttaaaactgagaagtctgcggctttcattttagatctaaagcatgggtggagacaacgaccgtgcgtgctggtcaagtgtgtcccttctcagaaagtcccaaaaccttccacccagtctcaaactgggtgtcaccatggcattactcagtggaacagttccttccttgatctcagttgatgggtctcactcaaaatgaaggactcccccaccccaaactactgtatagagttaactataagccacagagctttacgaaacacacaggaattctacatgtagacttgggtcctatctttaggtatttcattttgtacacagatattccaaactcggaagcccctctgccacctcatcttggatgaggagcaaccccatgtttgtccacagaggctcctgtggtttttagtcacgggtaaactggttgtcccctgtgtcttcattgatggggcccctgaccacagctgctcctttcctctcaggggaagagcgggctctgtgcctggtggacgtgaagaaggtgaagcagtccctggcgcagtcacacctgcctgcccagcccgacgtctcccccaacatattcgaagccgtcaaaggctgccacttgttcgctgctggcaaggtaactcccccttctcccctctccaggcttttactgatggaatgttctggaaaccaggccttcccttctcaccaaacttactgagtcgaccttaaaaattgggcctgcgaactctttgagggaaatgtctgaggagcctggaagccaatggcgaaacccggggtagcagagtgttagagaacaagtgtgtgtgatgagcctccacaaaacaacacttggaagacagaggcatgcagagctctgagtgcaaggccaacctggtctacagagcgagttccaagcctgctgcagatgtgtcacgaggccctgtctcaagacaaaccaaaaataatccagaaaaaaaaaaagcaattcgacatagaaagtgtgtttattactagaaacatacaaattctaaattatatttatttggtggtcccttggtgcctgccaccaattggctccagaaccactgctagtgacaaaaccaaacgccaagatgctgctgacctctgctgtgcgatgatggggtcctgtgctctcagccctgcctccatcatccctagatggcttacggtgctagtgtgggacccacagagtgagctagataagaaactggaaggttttttttttcaaggctatgcattgtcctctgaccactgttctagctgcaccttttatctgtggatgtgtatgtttttcattaccatcccatggattttaaagtttctcctatgaacagtgagttacttagaaatgtacatgttggtttccaaaaataacttaaaaattacaaatcactccttttattgtttggaatactaaagccaatgtgaaatgtgaatgtaaattgtaaagcctcatgctgaattgtgtgcacagcctccccaaccctagaagcagcatctccagtaattggtgtttttctctctgcccttcagtttagggatctatgtgcagtggatctcttttcagtctcagtgggagataaaagcctgactgtaggagatagaaatagaatcttcatgtagaactccataaccaccgacccgactgaataacttttcctctggatccaagtgtgtttattcttgtctccactgggctcagtttcccatggatctgtctgtctgtctgtcatggccgggaaggcatggcagccggagcttggagccaaaggctgttggcgcagacccttgtgtatcagaaagcagataggagtgctggccctcttcaggctcccttctttccaggtgtatttagtgtgtgaccccagcccgttgcttgccaccctgttatggtggtggtttgttgctaactggacaatctagaaccacctgggagaggagcccttccgcatgcctttgggggatgtaaattgatatgagctggcagtcttacttgtgggccggcccattcccattccctaagcagggcatcctggattgtataactgagcaatgtgagctgagcacgctccagcgtgcatgcatttgtctctctccacccccacctgttccagctcccgttgccccgttttctatacagccgtgagctgcaccgttcgctgagaatcaggttaaaccctgtcccccatgcattgctatgtcagaggatctgatcacagcaccagataagaagcccagactgagataatccactctgggaagggcctaaccatgcccaacatgtatgtcctcaggggttccaaatcatcaggttgacaatggagatgaacgacctcacaaatttccctagtacctacccctcacctttctcgtgtgtcactgtgtcctcctccactcagtaatgtcaaaaaagtctgtctccatccaaaggctcatatatatgaactgtgagatgtcacatggcccctagaccttctcttttgtcccagctaagtcagtgaatcccaaaccagaagacagttggtaatacgcagacagttttgattatcacaagtaaagggcactacgggcatctggtggttagggccatggtgctcccgttctcctccagtgtacgggtgctccctacctccatcacagaaaatgatctggtccaaaatgtctctgctgctgaggctgagaccttgtctagtttagggcagagctatagttggtgctggtgacaagttctccttcttgccccaatggccttctagatcgagaacagcctgtgcatctgcgccgctatgccaagcaaagtcgtcatcctccgctacaatgacaacctcagcaagtactgcatccgcaaggcaagccaacagcccagcctcccccggggtcccatcctgctatgttgaggatagcttgtgcctggccctctctgtttagagcgtgaaacctgtccttcctggaagagcccagagcctgtggtagccacagtgtcccctctctctttactcctgtgagggatctgcccagcggactcagctttctgaaggtggatggaggagatgcccctttgagctgacagaaggcagctttgtcttagaagttaacagtccctggcagtgtctgtcttgtctccctcagctcctggaggtttccggtgataagggataagccagcactggctccgttttgccttgtgatcaagagtctagttctcctgaggacagaatgctttgtaggggatgactgctgtgtggaggaagaaacattccaacctttaactttgcctcacttctggagacagtgtccgttgtccccagactaagtgtgttgtgtagtgacaagtccgggtcatgccatgataataccagaatgaaaggggaaatgagttacatgtccaggttgttagtgagccactgcctctgtgggcttgttagcccgtgcttctcgaccacccgtggatcagggaagctgggcaagagctgcctttccccatctaaggctgagtctacctttgattttcctacctctcaaggtagcatcccgcatctctgtttcctcgggcatggtatgcagccaagggatacattttctgtgagatacattttctgtgaaggtgacgattaaagtttgaaccattggctgcaggcaaacaggattcctggtcatcactccgagaaagcatgcttgttatgttttgttttaatgatattaggattagcttaggaacaactacaaataattaggaggcagttaagacaggcatgcagtaatgccaagtggctaatacagcctcaaattagaaaccagcaaattacaagccagcccaaagccagacactaggctaggtaccccagctgccagtgtcagtagttggtgtaagattccagccctttgctcctgcaaggatacattgttgccattttgcccgtctgtgcaaatttctcacccacttgggagttgcagttctgccttgtttttttcaggattgcagggactggggtagagcaaaggtagtgaggtaccatacaggttgtgggtcattctggcatgttgtgagaggcttggctagagcctcaggcagagacagagcagcagaaacatgcttcccgtgtcatctctgcccctctgtgcccctcacctcaggagatcgagacctcagagccctgcagctgtatccacttcaccaactacagcatcctcattgggaccaacaaattctatgagatcgacatgaagcagtacacgcttgacggtatgactgccatcctccaccctcctccccaccccacgtgggcagcttgggtccttcggagggagggtggctcgggcttcatccctgaagccccctgcctggcctgtcttcacagagttcctggacaagaacgaccattccttggcacctgctgtgttcgcctcctcgtccaacagcttccctgtctccattgtgcaggcgaacagcgccgggcagcgagaagaatacctgctgtgcttccacggtaggtcgccagcccagtgccaggacccagtgcctttcccttgctaggcagggtgggtcttgccaaggaggtggagaatgtctacccagcatcacggatgcccactgcgattcccttgtaagcagggcagtgacctggccaccctgacattctttcttgcctttgttttctcttgatttttttttccttttaagtgtttcttcttcttttttttgtttgtttgtttgtttgtttttaatattttttattaggtattttcctcaattacatttccaatgctatcccaaaagtcccccataccctcccccccattcccctacccacccactcccactttttggccctggcgttcccctgtactggagcatataaagtttgcatgtccaatgggcctctctttctactgatggccgactaggccatcttttgatacatttgcagctagagacaagagctcccgggtactggcaagttcataatgttgttgcacctatagggttgtagaaccctttagctccttgaatacattctctagctcctccattgtttcttagttttcaatctctgggcgtttctttttccccttcctgcctgtctctgcgtttctgtctgtctattcctcccttttttcctctcccacttttttttttctttttttggtttttcgagacagggtttctctgtatagccctcgctgtcctggaactcactctgtagatcaggctggcctcaaactcagaaatccgcctgcctctgcctcccgagtgctggggttaaaggcgtgtgccaccgcgcccggcttttttttttttgtttgtttttcttttcttttttttttttttttttttgtcaactttctttcttgaggaaaacggattactcagaaaacttcacttaggaaactttcaatttaaactgaagatggttctgtggtggtcgtctggctttgccagtccggttagagccagtcagttgcccatgggctttggtccttgttctcccatcaaagcacacgtggctaatgtccccatgcccttggcgccttacagaatttggggtgttcgtggattcttacggaagacgtagccgcacagatgatctcaagtggagtcgcttacctctggccttcggtatgtgaggtacggggtgggggcaggggggtcgcctgatctccaaagcttgtgtcctgggaaggaatcatgtggagtccttggctttggtctggtagtggtgccttctaatggacttaagtggcatgggcagaattcacctatcagtgtgtttgtggagaactgtgaacgtcttgtctccaaagccacagtttatccttggtggaacatacaatctcatgatacaaaggagaatattcctcgtggatttgaagtcattttcaaggctgtgtagtatcccatggcatacttgaacagaaatgagttctgactaggcagaatagtgagctcatacctgttcattctctaagtgcacacaccatgggaggcatccgagtgctgtcttgtcagatgttgttctctagttgtatgtcctaaatgcagagtaggtcaaagaagaaacagatgtgcaggcccataagttctgcaggaccaggatgctcgctctctctctctctctctctctctctcacacacacacacaaatacagacagatatacactcacacatgcacacacacatctctgtcagaaacacacacacatctctgtctctgtcacacatccacacacatacatccacacacacgcacacacattcacgcacatgcacggagtaaataaacaaatgtaaaagaaaatactttttttgttgttattgctcacctgttgctatgtaatgagcaatcctggatcttaggagctttaagcagctgctgttgtccccggctctgggtctgttaggctgtgtccctcatggtgtcactgggatctagggcaatcagaaggtacaaaacagccttagaaacaaggagaagcaaggtgccttctctgtctctctcttctgttgttggccacgggggtcacttagctagaggccttggttcctctctatctagactcatccaggacatagacagaggcttcatggcctttctcttgcaccacattatgctggttcaggcaggccaacagagctgccatgttcagagtcatggcttgccacaggagcagccgtgacaacagaggagggaacagggcccggcccgtcttctctggcagtagtgtcccctcttagagagataagtgttaagacatagctgcagtgctcgcacacaggaggttctggggttcatcaccagcctgggcaacatggggagaccgtctccaaattgaagcaaagtaacaataaagccctgctgtaatatctaaatcctgatcttttaaaaactcggcttggagaggacggggagagcactgactgctcttgcagaggaccctggttcggttcccaacacccacatggcagctcacagccatctgtgactccagttctgggaatctgacaccttctggtctctgagggcatcaggcacatatgtgcacagatactcatatacaggcaaaagacttatatctggggggaaaatctttaaaaacttggagagtgttgtagtataaagaggtccctaggagaattcttgccctggtgtccgtccactgcaatctccatcttgttgtccccaaagggaagaaggactttgctgagcttagcatcttcccagtgctctgtgcaaacacaagcatgtggtagacttctccccatctgggggataacatgctctgcacaagcttctcaacttgccctggtagacacagggcctcctggtgcgtcctttaccttgcacagagttccatggggatgcagtaatttacttaactgatataagttaagttaggttgtaatgagcaacaaggtagcgactgagcccaagctagtgtggttacactgagatgggtgctggatgctgggtcattggcaccatgataggtgctggatgctgggtcattggcaccatgataggtgctggatgcttggtcactggtccttccttgttcaggttttgattttactcccccctccctcccccacgccattttcccccctcatgctcatcctccgcggtggccttgcagcctacagagaaccttatctgtttgtgactcacttcaactccctggaagtcattgagatccaggccagatcctcactggggtaagcgtttcccgtttcccgccttgctttgaagacaggagtgccacccagcaacctttgtcgccagtaacaactttgtcaactctcttctggaaccctgcaggagccctgcccgagcatatctggaaattccaaaccctcgctacctgggccccgcgatttcctccggagcgatttacctggcctcctcataccaggacaagttaagggtcatatgctgcaaaggaaacctcgtgaaggagtcaggcactgagcagcaccgggtgccctccacctcccgcaggtactgagtctccttccctccgccatgtgaagacactcaaggaaaagcatcagactggggagggctcctggtcacagcggcagggagcctctggcatttccctgagggagccagccttcagtggctctgtagagaaaacggctccagactcatgtttccttgctttgctctgtgtctgtggtagtggctgctgagccccagggaaccctgtggccccttcttcgtgctgcttacgcccagtgcaagaggcaactggagcccttggtctaatcctgatgctagagcactagagcactgtgggggctcacagcaggacccgcagcctagacttgggaccaggaaggaagctgggggggggcatcggaagggcagggaggcaaagcaggcagaggggaggtcctgaggagtggggcaggggtgggggccggagtggacagtggcttcccaggccacctggaggcttctatggaacccgagaacgcttcagagttctattttattttataacttgtatttaaatttgtgttggaaatctaacccccagatatagtacccaaaggccacagaaagtattaaatagtagtctctttggtttcttttctttcttacttttttttaaaaataaagatttatgtatttttatttatttttgttttattgagatagggtctcattttgtagccttagctggcctggaagtcactattatggaccaggctggcctctaactcatagaggtcatcagcctctgcccctctgcctctgcccctgcccctctgtccctctgcctctgcccctgcccctgcccctctgtccctctgcctctgcccctgcccctctgtccctttgcctctgcccctgcccctctgtccctctgcctcttcccctctgcccctgcccctctgtccctctgcctctgtccctctgcccctgcccctctgtccctctgcctctgcccctctgcctctgcccctgctcctctgcccctgcccctctgcccctctgactctgcccctgttcctctgcccctgcccctctacctctgcctccagactgtgctactttcacctggctcatttttttaaattctattttatgcatatgaatattttgcctgcatgtatgtgtgtgcctcttacccaaggagaccagaagagggtgtctaatccactgtagctggggttacagacagttgtgaactgctgtatggttgctgggaattgaattcaggtcctctgaaaaaaaaccaaaaagccagcgctcttaactgctgagccatcagtctagcagcctgccccttagtttaaagagataatggccttgtcatgtccccatgtgtcttagttagggttttactgctgtgagcagacaccatgaccaaggcaactcttataaaggacagcatttaagtggggctggcttacaggttcagaggttcagtccattatcatcaaggcggaagcatggcagcatccaggcaggcatggtgcaggaggagctgagagttctacatcttcgtctgaaggcttgctagaagactggctcccacgtggttaggaggagaagggtctcattgcccacccccacaatgatacacctactccaacaaggccatacctcttaatagcaccactccctgacccaagcatatacaaaccatcacattccactccctggccttcataggcttgttcaaatgaatgagtttatgtccacacctaaacatagcataatgcaaagtacatttgatccaacttcaaaaggtcctatagtctatagcagtcttaacaacattaaaagtccaaaattcaaggtccctctcttctgatatccacccagtcacttaactgtaatccccaaagcaagacaggaaaccagctgggcagactccaaactctgcatctccttgtctgatgtcaaagatctccactcccttttcatctttgttgactgcaacaaactcctctctctggggctggttccactccctggtagcagctttcctcagcagatagtccatggctctgacatctcgaacatcttggagacccaaggcaacttcaacttgacaccttcttgtttcaatgtctgggatccacacatgatctgggctcctcctaagggctggtgtcactgccccagctctgccctctgtatctctctaagctcaggttgatccacttcactgctgctgctgttcttggtggtcatcccatggtactggcatctccaatacactggggccttagactgcaactaggcttcaccaatagcctctcataggctctcttcatggtcctcaaatccttttcatgaccccttcagttctgggccgtcagctgcaactgaggctgcctgttcaccggtagccttccatggcctctcacagtgccaagcctcagctgttcttcatgatcccttcatgccttcaaaaccagtaccactaggtgacagctgctgcagcccgaggtataactttagctatctctagaacacagcttctttgtgctctcagaaaacacttcccagaagatttttaaatcatttatttattttatttataagagtatactgtagctatctttagacacaccagaagagggcatcagatcccattatagatggttgtgagccactatgtggttgcagggaattgaactcaggacctctggaagaacagtcaatgctcttaaccgctgagccatctctccagctggtctcttcttaatcaccgctccagctaagtagcatccttctccccttgactatcaagtcagagacacatggccaaagctgctgagttttgctgcttgcaagagctggaacatggaccccttgttctattacattatcacttgcttcttcttttccagctccttcactgcctaagcttggctgacctggattttgctctgtagattgaccttgaactcagagatctgcatgtctgtctcctgggattaaagtgtgtaccaccatgcctggatctaaatttagctgggtggggtcttgcccccaaatctcttaatctgttatctcctagaacataatagattcattttcatgtgcccctttaatacttgaaccatatattttatactttccctttctaagcttgcttcacttgttcaaaatgctcttcatgagacttaaccagagaacaaagtctctactgggcttttgtgagacttcctttgtcaatgcaattaatataaataaatctctttaccttagactcaggcagactcttcagacaagggcaagatacagctactctctccacgacaatacaacaaaagcagtctctaggccacattctgaaattcttctccactgaatcctcttgggcccgggcagcacagttcaaatcactcacagcaacaaagtcttccatattcctactaggatggctcacaagccccactcaaagcatcccaaagctttccaaatccaaagtccccaaatccacattcttccaaacaaaagcatggtcaggcctatcacagcaatacctcagtccctggtacgaacttctgtcttagttagggttttactgctatgagcagacaccatgaccaaggacaacatttaattggggctggcttacaggttcagaagttcagtccattatcatcaaggcaggaacatggcagcattcaggcaggcatggtgcaggaggagcatgcatgagagttctacatcttcatctgaaggttgctatcagaatactggcttccaggatgagggtcttaaagctcatacctacagtgacacacctactccaacaaggtcacacctcctaatagtgccactcactgattcaagcatatccagaccatcacaccatgctaccctgaactcctggctcagacattcttctcccctcattcctcaaggatctgaacctctcttcttccaccaccaccaccacccaggaagaaaccaaattatctttctgcatatatatgtgcacatgtccacatgtgcaactctataaaaacaataccatgtatgagtctgttttctggcactatgacaatgaaatgctgagttataaagaaaagaagctcatggtacttgtcttagtcagggttctattcctgcacaaacatcatgaccaagaagcaagttgaagaggaaagggtttattcagcttacacttccacgctgctgttcatcaccaaaggatgcaggactggaactcaagcaggtcaggaagcaggagctgatgcaggggccatggagggatgtgacttactggcttgcttcccctggcttgctcagcttgaacccaggactaccagcccagggatggccttgcccacaatgggctgggccctccagccttgacccctaattgagaaaaatgccttacagctggatctcatggggtcattttctcaagggaggctcctttctctgtgataactccagcttatgtcaagttgacacacagaaccagccagtacagtactgttctatagtcgatgacccacatagtaaaaagacagagaccaacacacttttttggcttttctgtctctatatccaaccctgctcatgtcccaaaggcaatgtctccacatctaaataccacaattaaattccatttcaaccctcttaacatctcactgtgaggaggactagagagatggcttattggtgtgtgtgtgtgtgtgtgtgtctttgagaggactaaggtttggttcctagcacccacaccaggagtcttccaacagggagcaggggatccaccaccctcttctgatctccagcatctgcaagcacactatgctcttaaattcacacaggcacaggcacatcaaactctactctcgcacagtggggagtacatttttacacttgaaccctccagtcccctgggtcccactgtgttctctactgcgatacctgcctaccataaagacaccctgcaaggtgtacagtttagtggtctgagcatgtttgtaaatgtattaagcctccaccaatatctgagtttaaaatgtttccatcactccccaaaaaagtttgttttcctctgtgtcagcgactgcctccagccttgttccactttcagcaagggctactgttcatttgtcaggtggggcctcttcttgtccagcaagcccccaggttcagcccaacaaagacagccctgagtgtctgtatagattttccaggtcagatatcgatcccttttctggaagtgagcttatgagacactggagcctgtctgtgccttccagatgtttcaggctgctgattcttcgtggtggctgtcagttctcccatcgatccagggagaggcacgggcccagggcatgctaagtcgtcattgagccttagcaaggtcggttttcttgcaaaaatgctgttggattgctccaagctggttttgcaatccttttggtcagcatgcatgagtgtgcacatgtgcgtggttttttttttttttttttttttttggcagtactgagaattgaaccctagtactggcatagtagccaagggctctgccactgtgccacccctgcaccccagccttggtcggtgtggttttagtcagtccaggaccttgatgggacaagtggtagagttctgtgcactctttttccgtaccttaacatgtctgagcggtggctttacctcttcgtcgctgtggttttaaccatgggaatgtgctaggagaggccagcgccaatgccctttgacttgatcccatccccagagtgatagcacaacgggccagtgtgcacccctaaagtgcctagaaccttggtgtcatttctaactcatgccagagagggctccaaatgttggcagtaggcttccccatggccgtgcaccccacgtggcccactgctggctccaggtgctgtgaatgggaaaggggtagcctgccggctttccccaggggtgcccccctcaaaccccacttccgccaatcatccaatcatcgctgctcctggctgctgtgggcgggtcagagtatctataattggcttggcggctgtgaccccgagtttcctggtctgtttagcagacccggggaccataactctgcagaaaccataaagtggacgtggtagctcattggccattatggatacggagatggaagactgcccagttggcctggagtgatgaatgctgtctctgccctcattaatctaagcagccatcccgagtggccttcccgaagccaccctgcttcccaggacgcagagctccctccagctccctcccgatagccttaggatgggcccctgtggatgcaccctcgaaggtctctttcattacaaagaggcttaatgtatttctctcccttgggtttatttgttctaatgcatcttctgtctctccgagctctgcagctccaggaggcatttgattccagggtgtagaaatcagctcccttacatataataccccagagacatgaagtcggctggctttcagagcatttatctgaatcactagttagcacactggatgcggaggcgaggccacagccgaaagctgttcacgaccagctgacacttagaagatcagttttgcaaacccggtgtcctggttttcagctccttcccgcagcaagttcccgccatgcccgggctgagtgttggattgatcctaccaaaaggttgcagtgtccggggcttggtgaagagggttgtagttcccaagtagacggcttgtgtggcatgcacaaggccttggcttcaagttttagtaccactgaaaaaagagtccttgtgacctcagtggaccagaggatcagagatggctaatggttaagctctgggtcaggttgggtttttttgagctagctggactatctgtgtctgtcgtttggtttcctaatttccctaggtgtcatccctctgtccataggccatcttgtcattgccatggctcggggccatcagccttctgagcagctgtatcagttgccatagaaacttggaaaaaccaccggtggggagaggtgaccaaacgctgttatagatccaggcacccctgccccctctcaccacagcccttggtgggcctctaatttctgagtttctataggcttagcccctaacaggagacccctgggaaatattaggttggtatgatagagccaggagatcatgataccgggctgacctcgctttggcccctcagcagctcactgggccgcttccacctccatgcacctgcctgtgcagcaacaagaacttgttaccatttggcgttgttatgagacagcaagggccttgctgaggcaggagcatggtgaggatgcagtaagtgggagctggcacagacacctagaagtctggggttctcctgtcctcgtcctcaggtctcagcttttcctagtaagagggaatggtagttgttatgcctctaacccagcccttaggagctgaggcaggaggatcatgacttagaagccagcctgggcttttttttttttttttttttttttttttggtcttttgagacagggtttttctgtatagccctggctgtcctggaactcactttgtagaccaggctggcctcgaactcagaaatccgcctgcctctgcctcccgagtgctggaattaaaggcgtgtgccaccacgcccggcttcagcctgggctttatagtgtgttccagaccagctgaatacatactgagtgagaccctgtctcaaaaattaaaccaaatgaacagtgttgaaaagggtcccgggtggatacttagaggggacaggagctacagctttgggcctgtgacagctcctgactcctccttgtccccagcagccccaacaagcgaggcccaccaacatacaacgagcacatcaccaaacgcgtggcctccagcccggcgccaccggaaggccccagccacccccgagagccaagcacaccgcaccgctaccgagacagagagggtcggacagagctgcgcagggacaagtctccaggccgccctctggagcgggagaagtccccaggccgaatgctcagcactaggagagagcggtccccagggagactgtttgaagacagcagcaggggccggctgcctgcaggagcagtgaggaccccactgtcccaggttaacaaggtgagggacttttttttttcagggactcgtttcctgcctgaccccattctttaagggctgattctgttaagttggcatcgttcagtgtagcactctggtcagctgctggaggggcaagacaggcactgtaaagtcctgcttgccttatgcagggggccagcagttcctggctttggatgctaaaatcccctcctctctgtttggctcctaggtctgggaccagtcttcagtataagtctcagccagaaaacaaaacaaaacaaacaaaaaaacacctcctcatctcagtctgcaggaaaacaccgcgctctgagtctccaccacaggggaccccagcacccgtccgcccagccccgcccagcccggccctgcttggcctggccaggcccggcccgcattcggcacagctgggtccagactgtccttggcacggaccccccatctccaaggggtgcagctagccaaggctcttaggcgctgacagagctcaacattccccccctcttggaggggagggaccaccttcctgcagtcatctctgcactgttaaagctcacagcattcacagacttttgtacttagttccagcctgaacccgttcatcaaaaggaaaccaacccggactcgaaccgtggctggaagtctactgctactctaagatcctcgggttggtttttttttttttttcccctttggtttttatttctttttcctcctctttttttttttttttttttttttaagacaacagaattcttagtagacttggatagcgatgtatttcctgttgtagtggtttttagctagatcacaccatcaggtctttgccaatgaaatgtaggctagaagagcaccccctgcccgttggctaacctcccgtgtccatgtagcttcagtcatccttgtcccagtccattctcatagatggccctgtcttacccagggtgacatcgtagccaaatgtttaccgttctcattgcctttttaaggccttgacgacttcccttcccaccagctgagaatgtatggagggtcagtcgggcctctgctcagaggcagtgacctggggccaagggacctcaagctctcctcccccacccacccctcagcctcatctacccagcctgcttctccagctttctgcgtagctttggccaggaaagcgtgcaatagacttgctccaagcctagcattcataggccttggggttgggcctgggacctggggcaccacttcctgtccgagggtcacttctctgggatgaggaggagacccgactgggagctctgcatggcagatagctgcatgtgctgccccactaccccgacctgcctgactcctccctgggttgctctgccgatgtactgctgccatcccatagccccaccaaatcaagaccctcccgatgacctgtcaacaaaccggccacaacaggctgcaatctgtagcactgaaaaagcaaacaaaaacaaacaaacaaaaacaaaacaacaaaaaaaaaaacgctcaagccttacgaccagagaaggatttcagcaaaccacactcctccgtccctcctgccttccagttccctgctgacttcaaggacgactgtgtgctcacacaaaacccagcacggttctaccccactgaaactgtgacttcccagatgagcctctccctagggctggacctaaggccaggacattggagagaagccgcagctcaaagctcccagccccttgaggctggcgagttccccttaggtgcagtgcggctcaccccggctccgccctctttagagcccagaattcctggcaaccggatagaaccaaccaactagaggctttacagttggcaagctaactataggccttatctttgcctttaatctcccacaaggcctctcctgctttggattctcctcgactcttaggcgtgcctccaccacgaaggcacaccctaggtaggctgaaaggtagacctgtccccaccaccgcagcaggtgaccgtgtctgtgttttcagcccacacgtccgtccacagtccacgtcgcttcccagattacaacctggcctaaatgcagactccttcctgctctgtctctgacctaagtgctttcttgtttgagacgcctgtgaccctccacatcccgtgccctgctgttgtgttttctgtgttgcttggagtctttgggggtcatgttccctatcccccccctgcccccacccccacccccacccccagggcagatctgactggctgtttgctgaagttttttgtctcttggtccacaagtatttggaatggtcactgataactggtcttcagtcttggcatctcacttaggacctccacgagaaacgggctccttgagccctgacaagtgtatattgcgtgtctcatctgtgaagtgcttcctgctacatagagctagctcaacagactgtacatatttacaagaaactttatattcgtaaaaaaaaaaaaaaaaggaaattgaattggtttctacttttttattgtaaaaggtgcatttttcaatacttttgttttcaacggtggtagccgcggacagnnnnnnnnnnnnnnnnnnnncaaaagcttctattagcatcaataagattctaggtctccaaaaattacaggcttttcttcattacctttttttattaagaacgaggagaacacatgggcaattccagatccacctgagagggatgactctgttgttgaacaataatgaaataaagcagtggtctcaaaaaaaaaaaaaaacaatacgttcactcccttggcatcttttcttgtcagagaccataaaaagccccgctagggtctgtgcaggctcactgggcccatcagctctgggggatggatagaatcagaagctgttggagggggggggggggcacagtttggtcagcgtttctgtgaactagtggggacttgctcttaagaccattttttagggcaggggaccagaaagctcctttaaacggtcaacgaggctactttacaaggattaggtcagaacagattagccggaaggcagctaaccagaaaaacaggtcagcacgagctttttctgatcccattacactgaggccactgagaacttaatattgcatgtctctttcgagggagttccaatgaaggtaaccggatgcttcctgtctgcaaggtaaaccggtcccctccacttatggttcattattccccctccccaacccctgattccagtgatacctgccgctttacatctctgactcaacataacaaggtaatcagatgtagttaaaaattgactttgacagtcaaatctgatgggaggctacagtggattttcccctgtgactgtaagaaagaaaatgactcacaaggacttgggagatgttgcaacttcttcccatagaacaaacattagaaaaatgtccattcaccatcagccaaccagttcaacgattagcctagcaattcttggcagccaggggctaccttatacgctaagtaaacaggacttgcttctaaaaggagccgagaggtcctctagacccaagaactacctgtacggaacaacagtgaagtcatgaagtcacgcagccacgctatgtaatgaggcctcccctgctgcctctttgagtttagtgtaaagttgtatcaggtcacacaccttaattctcacagaactcaaggcattgggaacataccaagtttcctgactgtgagactcttgagcccttagggacagaaaaagagataacctacttactaatctgtctgcagcagggggccttttccataggttggttaagaacactcacactcagttaagacccataggaagagaagaggctagccctgtggggtggggcagcagagcttccaccacaggctggctcctttcagtgactcatagccaggacagtttgccttccttccccaagacaggatgcttgggggtagctaggcttagttctggttgccacaggtctgggttcctgatggtatcctaagggtggagaggggtcataaaataataattacagcctacacacacacacacacacacaccccaataacgatctatctctgtagtgccaaggctaagaaactagcctgctctccttgttccaggcagaggctgctctggatggctctttcttgctggcttaagatgttgctgctgctgtcttgaagtgtgaggactgggacccagtcacatgtcccatctgttttcctgaagcagtgggggctgcctgtggaaatacaatataggagtctccgctttcccctgggtctgtcaatgagtaatagagaggtttgctcagaagaggttattagaggtggaagaagactttgaaggtgactctgctactgtacccacccgtggcacctttagacagctacagattagggagcctggctgtggagtttctaaatggcacagttgaattctcttgggggtgggggtggggcaggggcaatagtaagagctggcctactgatgtggatctcagagacgcgtgcatccctcaggggcagtagcttgtccaaggtttggattcagatacagctgtcagaaactggatgattcttacagttaactgagatgatggactttagaagaaatacagacatgttcacgactcccttgctttcccttgaagactcgaggccaaaaggcggaaggctcaagtttctgtttgtccattaatctgcagtggaagtgttgaagactcatcggaagcaggactactcattgacccagccgtgggtcttcatcacatcattcagaccatctgtaaacatgggaggatattttcttgtgtagtggtgctatagtaaaatacccgagtcagggaagtttataaagaacaaatgtatctcttgaggatctggagattagagagtctgagacaaggtgctatgggttatggttatggccagggctgctggaggcctccaatatgatactttgtttctgaatctccacagccagaaggctttgtcctcacataacaaaagtcaggaaggtaagctagccaaaaaccttcatgaagcctctgttgtaagtcttcatcccctcatgtgggttagggagggactctcatgacttttcttcttccctttctttctctttctctctctctctctctctctctctctctctctctctctctctctctctctctctttcttttctttctcactgtagctgtcttcagacaccccagaagagggagtcagatctctttacagatggttgagagccaccatgttgttgctgggatttgaactcaggaccttcagaagagcatttggtgctcttaaccgttgagccatctcttcagcccaacttaactacttcttaaaccgcaccttttaaaactatcacagtacatacaactgacctgaagtagtcagaccacagcagatgaatgcgaattgtgctcacgttcaaggaaccggattaaacagatcttgttttctaaaacgcttctagcctccaatgtcagttccctgggtttcgaggatttctaacttgctgatggctgcattgtagtaggttccttgtctggtacaccgacttcctatttgtggccgcaacccattcttgttctgtgcttcccagtgtgacatgaggtaagggagccttgggtgtcagtttgcctagtccagcctcatctttcagaaagaggacatccctagaaggcacgtagagatttacacccagccctgatctacatctggttgggactcaaggactgacagtgtcagtcaggtgacttagtcttggtgcactatcaacttcccttgaggcaaaggaccctctcctgggtcctttagagtcagtgtgtttctgtgtggtgctgtgattggtcagattgactgcctagagagttacacaggaagcactcctggcatccacgagtctaacccatctaaactaaaactgtttgctgccgggcgtggtggcgcacgcatttaatctcagcactcgggaggcagaggcaggcagatttctgagttcgaggccagtctggtctacagagtgagttccaggacagccatctccaactctggagattttcataatggggacaggataccgagaaaccactgtatcaaccatgcattaccgttacgtcgtaataattttttcaggccttacctttgactctataaatgtgcttaagtttccagagggaggaaatctctttactaaaaagcagtttgagtaagtatcacggacccagtcctcatctatagacagaatgctaacagggcaagctgacttgggtcacaagctgaatgtagctgctgcttttccattcctttgaggtaatttactccactgcctttagctcctgggtctgagatctctcccagagccttgggcgtctcatgcaccacagaggacatcctcttgcttggaggaagtgagacttttctaaatatgcacacagagtgcacacgttctcattttttgagggggtgcctgttgtctgccgctctacgaatcatctcctttaggagccacccatgattccggggcgctcgctcccatagggtggactctgaactagtttgtacatggtattattctcagttgggtgtttcagccccttgtgggtagagctcaatttttctaaatgtttctgttttatgtgcattgttgttttgcctgcatgcatatctgtgcgaaggtgtaagatcttggagttacagttaaggagctgccatgtggacactgggatttgaacccaggtcttcctctagtcgacaggcagtcagtgcccttaaccattgagctacctctccagccccagcaggggacacaggatggccagatgtcctgatctctctcccaccttttttctcttgaagtgggatctcttactgaaccccagactcatgccttaactagacttgcttggccagtgagctctcatctgcttggtttcgccctgcagcactagggttacaagcacacaggactttgaagtggatgctggaggtctgaactcaggttctcacccttgggtagttagtgctcttatcaactgagccatctccctggggccccaacaactagctaattcccatgagatttcccagttcctccaacagtctcagaggcacccacaggtgtgatggcgaggcaagtctggtactgaccctcagccgatggcactcacagccgtctggtccactcactacagagagccacaggaaagcaaataaacatagaagatccactcttttcttcaaaaataaaaaaaaaaaaaatgtgctgagtcaaaagttactccagtaatttttacaaagctttattgaaacttgtacatcaagataagagcaagtcagggttttgaaaacagtaacaaaaggtacccaaaactcaggcttaaccaaatactgtgcctgcctctgctgacaggtgacaggaccttgtcccaatgggcacagctgtgatgtcaccatggaaaccagatggagtataagataggttcattcctgctcccctgctggaaacccagcagtctgctgtagggttccgagctcttcttttggaacaagcaacagcaaccaccgtgatactctctgctcactagagatgcaggtccccagctgaggagcacatgctggaactaaaaggagggtgggtgcttcgaccaggttgccatggtaatgtggccaacattgcaactgaaataaggtgtagccgactttctgcagtggtcggtcctcaggatcatctggcttaatggagaaatagcagtggggtttgaagtctgtcttgagagtgattattgctgagtgtagtcacatgatctctagtctcatcctggtgacttattgccttacgtaggagtggccagccagccactctggttaaagaggtcttagtgcacacagtgtcgggaaacgattgcaaagctgcatccggaaatcagacactgaatttccataggatctacaatctactgctttgattcagaaggacaggcaagacccaacactgctttcctccccagccaggcctcaccagggacaggccagcggcctcacggacgcaaacgatgatgaggacttctctgtggcttctgtccctgctccccaggttcgggtctggctgtagacatctctggccagcagagggggtgatgcttagagcacaaagcctcgtgcactgcgatgctggggctgcaggcggccgtgccatccctatttttggctatgcctggacagaccttcaaggaggactagggtgggtgagatgtcccagagtgagtgaggatgtgcatgcacacggagagtccagcaccgcctgccatccctgtggtccatggctgcctctcattccctcatatcggcttgtagaggagggtggtgacatactttttcttgtaccggtgtgttgcactgagcaccatcactccatcctaagagggcgaaaaggaccagagtcaggggctcagtcagagagaacaggagactcactacacggtcaccgcaaacacagaccccgaaggctgctctgcttgtccacacccaaggccaccctggcgcgtggggtcctcagagcacaggctcagaaacggcttggaggcaagacaggccattcattaccttgatggagagtgcatagaggtggttcagcatgacgtggttgggctccggaagcagtgctgggtcacactgagggacaaagggagacgtgagcaagtaggattcagaagtcaaaatggtccctgccccctatttcatggcctggttggggtagccaaggagaggagccaggctctgttggttgacctggcttcccaagccgggcagtgtgagttgtggagatgaccagagaggtgaaaggggtggatcctcgtgccagccagatgctacggaaggcacttccggtaagttttctccctgacctttaaggcaggccctaccccattctcttacagagcagaccagagacccactgtgtgttccatgctcccgagaagtggatggtaagccaagcctctacagctagacgaggaagtatgttgcagtaggtgaatctacaagtggacacgtgaacacttcaccacacctttctacctccctagagcatcttcattcacattcccaactcttaagaacatgcacttgtgtgtgtgtgtgtgtgtgtgtgtgtgtgtgtacaggctactagcttgaggttcctgcctcaagggaagggcacattcctgtcactcaacactacgggaatcccaggcctgaagtgactttaagatctcacagctgccaacaggcctctgaggccttggggtggagggaaaccaagagctctaacacagtgtgaccaggcccttccacatgaagctggacggcctatgccacacacaggcatattgagggctctgagtggtggcctggggagtggccacccgcatcctacagagccctgcagtggttatgtttgagtctgggaaatctgctggggacaaataacccatgcacacaggagcacacaagagaagtggagtgggaggatccaggtcctagtccagctctgccctagcagggcctccaaggcatgcacaggtccagtgagctcctacggggcaggcagagcaggatggctgctgatgagagaacaaggagaggccctgtgtgcctcagctgcacgctgcctcaaccaactgctacagggatcttaaaaaaaaaaaaaaaaaacaaacaaaaagcagtttccatctgtcacttttaaagctgtctaatatatggatcataccatatttgggacatgcaagttctgaggaatggctacaccagatctctaacatattcacccttttttgtgtgtgcgattaaaaaaccacttaaaatctaccttgtgctgttagtgagcaaagaggtcagtccgtctaaggaaagcattatggatgacgtctaaagttagacacagaggtaccttgtgatgcagtcacccagcccatgggtgtgcacacacatgtgcgtgtccaaaggaaatagaacctggatggatttacatatgggtgtgcatatggcactgtggagccccgctgcagnnnnnnnnnnnnnnnnnnnngaaggggcacattcctgtcactcaacattacgggaatccccagtcctgaagtgactttaagatctcacagctgccaacaggcctctgaggccttggggtggagggaaaccaagagctctaacacagtgtgaccaggcctttccacatgaagctggacggcctatgccacacacaggcatattgagggctctgagtggtggcctggggagtggccacccgcatcctacagagccctgcagtggttatgtttgagtctgggaaatctgctggggacaaataacccatgcacacaggagcacacaagagaagtggagtgggaggatccaggtcctagtccagctctgccccagcagggcctccaaggcatgcacaggtccagtgagctcctgcagggcaggcagagcaggatggctgctgatgagagaacaaggagaggccctgtgtgcctcagctgcatgctgcctcaaccaactgctacggggatctttaaaaaaaaaacaaacaaagccgggtgtggtggcacacgcctttaatcccagcacttgggaggcagaggcaggcggatttctgagttcgaggccagtctggtctacagagtgagttccaggacagccagggctatacagagaaaccctgtattgaaaaaccaaaaaccaaaaacaaacaaaaaacagtttccatctgtcacttttaaagctgtctaatatatggatcataccatatttgggacatgcaagttctgaggaatggctacaccagatctctaacatattcacccttttttgtgtgtgcgattaaaaaaccacttaaaatctaccttgtgctgttagtgagcaaagaggtcagtccgtctaaggaaagcattatggatgacgtctaaagttagacacagaggtaccttgtgatgcagtcacccagcccatgggtgtgcacacacatgtgcgtgtccaaaggaaatagaacctggatggatttacatatgggtgtgcatatggcactgtggagccccgctgcagtccctgagagacaattcacaggacataggatgtggccagatgtggcatactatgtataactacagatgcagtgtgacccctccctcaaactcctgctgtcctctccccacccccataggatgggctagaacctgggactgtgagtccaaatataccctttcactttaaattgctcatcaaaaattgtatcacagcagctggacaagaaactacaacagtgggtggctcagccttaaaaaggaaggaaattctgtcacttgcaacaacgtggatggactatggacataaataagccagccacagggagacacatgcgacatcttttaaaagcaggctaggagaactggatggtaattctggggaagacaccggttaaaagctacaagatgtctgcagagacaactgtgagaggagctacggcccgagaacaggctgaccacagtcattcacaggacagcagatttcccaaagcctctaagaaaagaactctgagcgctgtctggggatgccagtcaacgtatctgctacagtctcttcactgtgaagctgaaataagactcctcggagagcactttcctaactgaagacaagatctgtaagagctgacagtgaggtcagacacagttctcctgaattcatggtctagcctctccctagccatgcctctgtgtgtgtgtatgtgtgtgcgtgtgcgtgcacgcgcgctgaatctttagggacagcggctaagggtccttgcagttctgttactaatgcgcactggttatttgtttagccagtggggtctgaggctgagtggtctctccactgacctcctcctggattcacaggagtgagccgggatctgtgcttggtcacagcacagagtggactgagtccacttaaggaaaggcacgtcttccacaaaccctgacactgccgtagggaaccctccacacacagtcagctcagcagcacgtgggctctgctgctgtgtccagtgttgagggaggggctttctttagcaccagatacagtttgctttgtccctaagggctcacgtactgggaacttagtccccagtgactgctgggagatgggtcctaactggtgatgaattaggtcatgagggcggagcatgggctaatgtaggcaccctgagtgggtcagtcatcctgagggcatcgcttgcccttgcaccttctgccacagtggatgtggtagaggttataatgtgttataagacagctcgaattctaccccaggagggctgacgtttccaaaagtaacttagtaactaaaactagattctaaaatgtctagctgaccaaggggtgtgtaacagatgtgaatctttcacaatgtcaggggaggaccac

SEQ ID NO: 916 - DNA, 7911 bp, Mus musculus
gtgctgccggaggacctcagggccccttaaagaggacccattcccctgtagaccagtctctgtcccctgcaagctttacctgcattcttgcccatggcgcttcccattttctgtgtgatcttatctccctcacttaatctctctgttcctgtgtcttcattctatgagctggactgaggccttgggtgggaaagtgggctctgtattctattccgtgcctaacccagcgcctccttcttgtgtctttctccctctctagcctatctggtcagtcaggcaaccgatcttcctcaggatcattgatctctgtacctccaggggcagtgaaccttcctttccctgggataatcctcaaggctcactgatcaaaccctttgggcttggttcacaggttaggtctatgtagctacgcgacatcagatatttgtgttcgtcagggttttctaggggaaaagagctggtagaatggaaaagtggagatttattaggctgcagtctgctagtccaccaatggctggtagttcttttggaaatgatttatttccatcccttatgtgtatgagtacctttggccttcctgtgtctgtgccccatgtgccgtggaggctggtcgccacctcctcatcctgatctctttagggagacacgactctgccaagcccttcctgccttcaatgtcagtacccgcttgactttccccagtgttccttcggcgttggcggagagatgttgaagttcaagtatggtgtgcggaacccgccggaggccagtgcctccgagcccattgccagtcgggcctccaggctaaatctcttcttccaggggaaaccgcccctcatgactcaacagcagatgtctgctctttcccgggaagggatgctagacgccctcttcgctctctttgaagagtgcagccaacccgccctgatgaagatgaagcacgtgagcagctttgtccggaagtattccgacaccatagccgagttgcgggagctgcagccgtcggcgagagacttcgaagttcgaagccttgtgggctgtggtcacttcgctgaagtgcaggtggttagagagaaggcgaccggggacgtctatgccatgaaaatcatgaagaagaaggctttgctggcccaggaacaggtttcatttttcgaggaggagaggaacatattatctcggagcacgagtccttggatcccccagttacagtacgcctttcaggacaaaaataacctttacctggtcatggaatatcagcctggaggggatttgctgtcgcttctgaacagatacgaggaccaattagatgagagcatgatccagttttaccttgctgagctgattttggctgtccacagcgtgcaccagatgggatatgtgcatcgagacatcaagcccgagaacatcctcatcgaccggacgggacacatcaagctggtggattttggatcagccgctaagatgaattcaaataaggtggatgccaaactccccattgggaccccggattacatggctccggaagtgttgaccgtgatgaacgaggaccgaaggggcacatacggcttggactgtgactggtggtctgtcggagttgttgcttatgagatggtttatgggaagaccccattcacagagggaacctccgcccggaccttcaacaacatcatgaacttccagcggtttttgaagttcccagatgaccccaaagttagcagtgagctccttgatctgcttcagagtctgctgtgtgtccagaaagagagactgaagttcgagggtctctgctgccaccctttctttgccagaacggactggaacaacatccgtaactctcctccccccttcgtccccaccctcaagtctgacgatgacacctccaattttgatgaaccagagaagaattcgtgggtttcatcctctgtgtgccagctgagcccctcgggcttctcaggcgaagagctgccgtttgtgggattttcgtacagcaaggcactggggtatcttggtagatctgagtctgtcgtgtcgagtctggactcccctgccaaggttagctccatggaaaagaaacttctcatcaaaagcaaagagctccaagactcccaggacaagtgtcacaaggtgactcccgatgctggtggcttctgtgctaagtgggttagagaagtgaccgtgcgagcgaaacaggacttggatgacaggactgacctagcctttggtgactgtctttttgaagaactgtatgctcctgggcgaagaagcaatggtatttccatcacagctcttggcgaattagcgatggagcaggaaatgacccggttacatcgcagagtgtcagaggtggaggctgtgcttagtcagaaggaggtggagctgaaggcctctgagactcagagatccctcctggagcaggaccttgctacctacatcacagaatgcagtagcttaaagcgaagtttggagcaagcgcggatggaggtgtcccaggaggatgacaaagctctgcagcttctccacgacatccgagagcagagccggaagctccaggagatcaaggagcaggagtaccaggctcaggtggaggagatgaggctgatgatgaatcagctggaagaagacctggtgtcagcccgcagacgcagcgatctctacgagtctgagctgagggagtctcggcttgccgccgaggaattcaagcggaaggcaaacgaatgtcagcacaaactgatgaaggtagtcagccaccctccaagaggggactccgggggcacggccctggatgatcttcacaagatgcaaggccacgctggcttaacgagtgctaaggaccaagggaagcctgaagtgggagaatattccaaactggagaagatcaatgctgagcagcagctgaagatccaggagctccaggagaagctggagaaggctgtaaaagccagcacagaggccaccgagctcctgcagaatatccgccaggcaaaggagcgagcagagcgggagctagagaagctacacaaccgggaagactcctccgagggcatcaaaaagaagctggtggaagccgagaacaaggtaaagagactagagaccatggagcgtagagagaacagactgaaggatgacatccagacaaagtccgaacagatccagcagatggctgataaaattctggagctggaggagaaacatcgggaggctcaggtctcagctcaacatctagaagtacacttgaaacagaaggaacagcactacgaggaaaagatcaaggtattggacaatcagataaagaaggacctggccgacaaggagagcctggagaacatgatgcagagacacgaggaggaggcccacgagaagggcaagatcctcagcgagcagaaggcgatgatcaacgcgatggattccaagatccgatccctggagcagaggatcgtggagctgtcggaagccaacaagcttgcggcaaacagcagtctcttcacccagaggaacatgaaggcccaggaagagatgatctcagaactcaggcagcagaaattttacctggagacgcaggccggaaagctggaggcccagaaccgaaagctggaagagcaactggagaagatcagccaccaagatcacagtgacaagagtcggctgctggagctggaaacaaggctgagggaggtcagcctggagcacgaggagcagaagctggagctgaagcggcagctcacggagctgcagctgtccctgcaggagcgcgagtcccagctgacggccctgcaggccgcccgggcagcgctggagagccagctccgccaggcgaagacagagctggaggagacaaccgcggaagcggaggaggagatccaggcgctcacggcacatcgcgatgagatccagcgcaaattcgatgcccttcgcaacagctgcacggtcatcaccgacctggaggagcagctgaaccagctcaccgaggacaacgccgagctcaacaaccaaaacttctacctgtccaaacaactcgatgaggcttccggggccaatgacgagattgtgcagctgcggagtgaggtggaccatctccgccgtgagatcacggagcgggagatgcagctcaccagccagaagcaaacgatggaggctctgaagacgacatgcaccatgctggaggagcaggtcctggacctggaggccctgaacgacgagctgctggagaaggagcgccagtgggaggcctggcggagcgtcctcggcgacgagaagtcccagttcgagtgtcgagttcgagagctacagaggatgctggacaccgagaagcagagcagggctagggccgatcagcggatcaccgagtcgcgccaggtggtggagttggcggtgaaggaacacaaggccgagattcttgctctgcagcaggctctcaaggagcagaagctcaaagccgagagcctgtcggacaagctcaacgacctggagaagaagcacgccatgctggagatgaacgcccggagcttacagcagaaactagagacagagcgggagctcaaacagaggcttctggaggagcaagccaaattgcagcagcagatggacctgcagaagaaccacatcttcagactgacgcaagggctgcaggaggcgctggaccgggcggatctgctgaagacagaaaggagcgacctggagtaccagctggaaaacattcaggttctctactctcacgagaaagtgaaaatggaaggcacaatctctcagcaaaccaaactcattgatttcctgcaagccaaaatggaccagcctgctaaaaagaaaaaggttcctctgcagtacaatgagctgaagctagccctggaaaaggagaaagcccgatgcgcggagctggaggaggcccttcagaagacccgcatcgaactccgctctgcgcgggaggaagctgcccaccgcaaagccacggaccacccgcacccgtctacgccagccactgcgaggcagcagatcgccatgtctgccattgtgcggtcgcccgagcaccagcccagtgccatgagcctgcttgccccaccatccagccgcagaaaggagtcgtcaactccagaggaattcagccggcgtctgaaagagcgcatgcaccacaacatccctcaccggtttaatgtgggcctgaacatgagagccaccaagtgcgccgtgtgtctggatactgtgcactttggacgccaggcatccaaatgcctcgaatgtcaagtgatgtgtcaccccaaatgctccacctgcttgcccgctacctgtggcctgccagctgaatatgccacacacttcactgaggccttctgccgggacaaaatgaactccccggggctccagagcaaggagcctggcagcagcttgcacctggaagggtggatgaaagtgcccagaaataacaaacggggacagcaaggctgggacaggaagtacattgttctggaggggtcaaaagtcctcatctatgacaatgaagccagagaagctggacagaggccggtggaagaatttgagctgtgccttcctgacggggacgtatctattcatggtgccgttggtgcttcagaacttgcaaataccgccaaagcagatgtcccatacatcctgaagatggagtctcacccacacaccacctgctggcctgggagaaccctctacttgctagcacccagcttccccgacaagcagcgctgggtcaccgccttagaatctgtcgtcgcaggtgggagagtttctagggaaaaggccgaagccgatgctaaattacttggaaactctctgctgaaactggagggcgatgaccggcttgacatgaactgcaccctgcccttcagtgaccaggtggtgctggtgggcacggaggaaggcctctacgccctgaatgtcttgaaaaactccttaacccacatcccagggattggcgcagtcttccaaatttacatcatcaaggacctggagaagctgctcatgatagcaggggaagagcgggctctgtgcctggtggacgtgaagaaggtgaagcagtccctggcgcagtcacacctgcctgcccagcccgacgtctcccccaacatattcgaagccgtcaaaggctgccacttgttcgctgctggcaaggagatcgagacctcagagccctgcagctgtatccacttcaccaactacagcatcctcattgggaccaacaaattctatgagatcgacatgaagcagtacacgcttgacgagttcctggacaagaacgaccattccttggcacctgctgtgttcgcctcctcgtccaacagcttccctgtctccattgtgcaggcgaacagcgccgggcagcgagaagaatacctgctgtgcttccacgaatttggggtgttcgtggattcttacggaagacgtagccgcacagatgatctcaagtggagtcgcttacctctggccttcgcctacagagaaccttatctgtttgtgactcacttcaactccctggaagtcattgagatccaggccagatcctcactggggagccctgcccgagcatatctggaaattccaaaccctcgctacctgggccccgcgatttcctccggagcgatttacctggcctcctcataccaggacaagttaagggtcatatgctgcaaaggaaacctcgtgaaggagtcaggcactgagcagcaccgggtgccctccacctcccgcagcagccccaacaagcgaggcccaccaacatacaacgagcacatcaccaaacgcgtggcctccagcccggcgccaccggaaggccccagccacccccgagagccaagcacaccgcaccgctaccgagacagagagggtcggacagagctgcgcagggacaagtctccaggccgccctctggagcgggagaagtccccaggccgaatgctcagcactaggagagagcggtccccagggagactgtttgaagacagcagcaggggccggctgcctgcaggagcagtgaggaccccactgtcccaggttaacaagttccctgctgacttcaaggacgactgtgtgctcacacaaaacccagcacggttctaccccactgaaactgtgacttcccagatgagcctctccctagggctggacctaaggccaggacattggagagaagccgcagctcaaagctcccagccccttgaggctggcgagttccccttaggtgcagtgcggctcaccccggctccgccctctttagagcccagaattcctggcaaccggatagaaccaaccaactagaggctttacagttggcaagctaactataggccttatctttgcctttaatctcccacaaggcctctcctgctttggattctcctcgactcttaggcgtgcctccaccacgaaggcacaccctaggtaggctgaaaggtagacctgtccccaccaccgcagcaggtgaccgtgtctgtgttttcagcccacacgtccgtccacagtccacgtcgcttcccagattacaacctggcctaaatgcagactccttcctgctctgtctctgacctaagtgctttcttgtttgagacgcctgtgaccctccacatcccgtgccctgctgttgtgttttctgtgttgcttggagtctttgggggtcatgttccctatcccccccctgcccccacccccacccccacccccagggcagatctgactggctgtttgctgaagttttttgtctcttggtccacaagtatttggaatggtcactgataactggtcttcagtcttggcatctcacttaggacctccacgagaaacgggctccttgagccctgacaagtgtatattgcgtgtctcatctgtgaagtgcttcctgctacatagagctagctcaacagactgtacatatttacaagaaactttatattcgta

SEQ ID NO: 917 - protein, 2203 aa, Mus musculus
GDTTLPSPSCLQCQYPLDFPQCSFGVGGEMLKFKYGVRNPPEASASEPIASRASRLNLFFQGKPPLMTQQQMSALSREGMLDALFALFEECSQPALMKMKHVSSFVRKYSDTIAELRELQPSARDFEVRSLVGCGHFAEVQVVREKATGDVYAMKIMKKKALLAQEQVSFFEEERNILSRSTSPWIPQLQYAFQDKNNLYLVMEYQPGGDLLSLLNRYEDQLDESMIQFYLAELILAVHSVHQMGYVHRDIKPENILIDRTGHIKLVDFGSAAKMNSNKVDAKLPIGTPDYMAPEVLTVMNEDRRGTYGLDCDWWSVGVVAYEMVYGKTPFTEGTSARTFNNIMNFQRFLKFPDDPKVSSELLDLLQSLLCVQKERLKFEGLCCHPFFARTDWNNIRNSPPPFVPTLKSDDDTSNFDEPEKNSWVSSSVCQLSPSGFSGEELPFVGFSYSKALGYLGRSESVVSSLDSPAKVSSMEKKLLIKSKELQDSQDKCHKVTPDAGGFCAKWVREVTVRAKQDLDDRTDLAFGDCLFEELYAPGRRSNGISITALGELAMEQEMTRLHRRVSEVEAVLSQKEVELKASETQRSLLEQDLATYITECSSLKRSLEQARMEVSQEDDKALQLLHDIREQSRKLQEIKEQEYQAQVEEMRLMMNQLEEDLVSARRRSDLYESELRESRLAAEEFKRKANECQHKLMKVVSHPPRGDSGGTALDDLHKMQGHAGLTSAKDQGKPEVGEYSKLEKINAEQQLKIQELQEKLEKAVKASTEATELLQNIRQAKERAERELEKLHNREDSSEGIKKKLVEAENKVKRLETMERRENRLKDDIQTKSEQIQQMADKILEEKHREAQVSAQHLEVHLKQKEQHYEEKIKVLDNQIKKDLADKESLENMMQRHEEEAHEKGKILSEQKAMINAMDSKIRSLEQRIVELSEANKLAANSSLFTQRNMKAQEEMISELRQQKFYLETQAGKLEAQNRKLEEQLEKISHQDHSDKSRLLELETRLREVSLEHEEQKLELKRQLTELQLSLQERESQLTALQAARAALESQLRQAKTELEETTAEAEEEIQALTAHRDEIQRKFDALRNSCTVITDLEEQLNQLTEDNAELNNQNFYLSKQLDEASGANDEIVQLRSEVDHLRREITEREMQLTSQKQTMEALKTTCTMLEEQVLDLEALNDELLEKERQWEAWRSVLGDEKSQFECRVRELQRMLDTEKQSRARADQRITESRQVVELAVKEHKAEILALQQALKEQKLKAESLSDKLNDLEKKHAMLEMNARSLQQKLETERELKQRLLEEQAKLQQQMDLQKNHIFRLTQGLQEALDRADLLKTERSDLEYQLENIQVKHEKVKMEGTISQQTKLIDFLQAKMDQPAKKKKVPLQYNELKLALEKEKARCAELEEALQKTRIELRSAREEAAHRKATDHPHPSTPATARQQIAMSAIVRSPEHQPSAMSLLAPPSSRRKESSTPEEFSRRLKERMHHNIPHRFNVQMRATKCAVCLDTVHFGRQASKCLECQVMCHPKCSTCLPATCGLPAEYATHFTEAFCRDKMNSPGLQSKEPGSSLHLEGWMKVPRNNKRGQQGWDRKYIVLEGSKVLIYDNEAREAGQRPVEEFELCLPDGDVSIHGAVGASELANTAKADVPYILKMESHPHTTCWPGRTLYLLAPSFPDKQRWVTALESVVAGGRVSREKAEADAKLLGNSLLKLEGDDRLDMNCTLPFSDQVVLVGTEEGALNVLKNSLTHIPGIGAVFQIYIIKDLEKLLMIAGEERALCLVDVKKVKQSLAQSHLPAQPDVSPNIFEAVKGCHLFAAGKEIETSEPCSCIHFTNYSILIGTNKFYEIDMKQYTLDEFLDKNDHSLAPAVFASSSNSFPVSIVQANSAGQREEYLLCFHEFGVFVDSYGRRSRTDDLKWSRLPLAFAYREPYLFVTHFNSLEVIEIQARSSLGSPARAYLEIPNPRYLGPAISSGAIYLASSYQDKLRVICCKGNLVKESGTEQHRVPSTSRSSPNKRGPPTYNEHITKRVASSPAPPEGPSHPREPSTPHRYRDREGRTELRRDKSPGRPLEREKSPGRMLSTRRERSPGRLFEDSSRGRLPAGAVRTPLSQVNKFPADFKDDCVLTQNPARFYPTETVTSQMSLSLGLDLRPGHWREAAAQSSQPLEAGEFPLGAVRLTPAPPSLEPRIPGNRIEPTN

SEQ ID NO: 918 - DNA, 155293 bp, Homo sapiens
tggtgccaggcactgtgccaggccctcctaggaccttgtcttactcaatcctcacacagtgctgcaagaggattagtcttatccctgttttagagaggatgaaactgaaaggcagcgaggtgaagtcaccagcaggaggctgaagccgcccaggctaactggccttatagctacctagggactcaggaatatcacacctgtttatcatcaaaaggagaaaggatttcagttccttggggtagaagagtttctttttgctaatcaaacattttacttgaggcttcatattcttcttcaagatttttttcctgtgtatgtaccaacacatgtaataattccttgtttatttcaaaaaaggggttgtactttattctttacaagatttcactttatattgtcatggacaattttccatggcagtatgaataaatggaatctgtttgtttttaatatctttgtcttatcccattgtttacatatgtcatattttagccagtctctaactgatggatagctgaatgatttccatgtttttttcccctgttacaaacaatactgcaaggaatctatttatctttctatttatctgcaaactattgtaagtacctgtaaattgttagaagtggaattactaggtcaaaggggatattttcacatttaaattttgaatagaggctgtcagttgccttccacactgactataaaaggaaaagattgtatcacatttattgcaagccttctgtattctgctgggtgctgaggggaatacagaaaggatataagagtggttgccctctaggaatatccgtctacactgtacctaatcctagggaatgtctggggtgtcaacttgtgggtgggaaagtgggtggatttaattcaactgttcaagcttgccttgcaaacactgtgcatggtgtctgggactagtctttcattatattgattcccctgggtaacagatgtaatttccttagggcagggacttcatcctacatgacttacagcgtgccttacacatcttctttgctttgtggagaccttgttattataacacgtcaggtgatattcgaggatctaattgaggcattccctatttttgggtgtgtgaagaattaataactttggcattctatacaggtcatggaatatcagcctggaggggacttgctgtcacttttgaatagatatgaggaccagttagatgaaaacctgatacagttttacctagctgagctgattttggctgttcacagcgttcatctgatgggatacgtgcatcggtaagtgagactctggtagcatttttatgctgaggattttcctgtgtcgcataagagttcctgcatggaaatgagtggatgagtgatttcaagatcaagataacgccccatccagtttttagccagtctaccaataactggctgaaagcaaactttccaagatggaggacatttcagcttgcttatccagcagtgcaatagatctagaattgtaatgtgctcaagtttgctagtaatatctattaatgtagctaaataagactgggaactcttgcatgggttctttgggttatatgatagaagaactgaatttggtttgcagaaggaaatgtcataccacatagtagtgtaagaccatggagctgtacttctctaactctgcccgttagaatttacaatttttttttttttttttttttttgagacagagtctagctctgttgccaggctggagtgcagtggtaccatattggctcatggcaacctccgcctcctgggttcaggtgattctcctgcctcagcctcccaagtagctggaattacaggcacgcaccgccatgcccagctaatttttgtatttttagtagagatggggtttcaccaggttggccaggatggtcttgatctcctgacctcatgatccacccaccttgtcctcccaaattgctgggattacaggcatgagccaccatgcctggcctacaaaatcctcagttggtaagtggttcttcatgtcttcattcatctgatgttttgtgtacatctgagaatgttgtgggaatacaatgattgttagtccaggaatcacaaaatttgagatagagtctcagcttttccattgcctagctacatgaccttgggaaaatttcatagctccttttggccttagttttcctcatgtgaaatgtgtgtctctaggagaaataatccattgaataatatgtgtttcatttctcttccttttctttctctcctatccttccttgctccctctcgccctttttctctttccccctctctccctctctctctccttccttccttcctttcggttaaattcattttgcaaaatgtatgctaataatttatatccaccaatagaggaggtctatataacagaatacataaacaaagatttttggctcaattgagattctaggttagcacttgcttgctgattgggatggaggaggcaattcatggtcctgattttcttacagagacatcaagcctgagaacattctcgttgaccgcacaggacacatcaagctggtggattttggatctgccgcgaaaatgaattcaaacaagatggtaaaaaatggaataagatagcttaatagagtttatactaaaaagtattcttggtcctcctaagtttgggaagtgttgggataaaatggtgaacaatgttttggagcctttggcagtgtatgggggtggggacagggacacagaaccatttcccagaccgtggcacctttttatttatagtgcctgttaataccctccaagacatttttaggagcattgttatagtttggttagaaataaaggaaaatgcttattttgtttctctcttcattttccttgcctgttatagactgtcttttgttatattatcttttttactttaaaatattttgatgaaatggaaactcctgcatgtcaaatcctctatttcctatgcagcaaaattgaaattaatcactggagcatttgaaccaaatatccttaagtgttaagaaccaagtgctcaaaatatcatttttaagtcttggatctttggtagaaattaaactgtattccacatgctaagtaggacggcaggagggtagctactgagatcaagagtgagactactttaggaaaaagatgacaaagtaaaaaaagattagagtttaaaaatcttctaataaagttggtatgtactaaaatatgaatttggaagtcaactccgcaaaaaaggataggtctaagagaaaatcgacttaggttttaagactgattttacaactgagccatttggtgacctagacaaatccttgggaacttgatcttttatactttctctagaaaaaactgatgctagtgaaaatgcataatttaagaggttagagaagctgctcttcaaaatgccccccaagtctgagagttaaatcctttacataaaggacaatatgtaaaattttctttttcttttttctttttttttgagacggagtctcgctctgtcccccaggctggagtgcagtggcgcgatctcggctcactgcaagctccgcccccctgggttcacgccattctcctgcctcagcctcccgagtagctgggactgcaagcgcccgccaccatgcccagctaattttttgtatttttagtagagacggggtttcaccgtgttagccaggatggtctcgatctcctgacctcgtgatccactcgcttcggcctcccaaagtgctgggattacaggcataagccactgcgcccggctcttttttttcttaaactgcttccagaaaagtggatattattaggttgatgttaagaaaaggcttggagttgcattaactttttgctttctagcatctggcctgtctgttctgcagacctgagacctacttgagataattttcttggtgttcaggcccttggaaaaataagttccctatgttgtccagtgtcaaagtttctcaacctcagcactattctttttttcaggttattttcttgtaatctgttcacttgatcattacattaagaattagattatattgctataactacaaagcattttatgttttaaaaattatgtacaatttagaaacaggcatgaaaacttaggtattaaatttagtggaataaagcacagaaaaaaagttaaaataatgcagttttatcacttaggattaaacatttatatgggccgggtgtagtgcctcacacctgtaatcccagcacgtttggaggtcgaggcgggaggattgctggagtttgagaccagcctgggcaacaaaatgagacctagtctctacaaaaaatcaaaaaattagccagacatggtagtacatgcttgtagctccagccacatgggaggccaagacagtaggatcgctggagcgaaggaggttgaggctgcaatgaccgtgtttgcaccattgcattccagcctgggcgacagaacaagaccctgtcttaaaacaaatttatatgctgcattcgtgaaattaaaaaaaaatcatggatttagaaataaattgaagcaaggtacattgacagtgtaacctcagcactactgacattttgatctgaataattctttgttgtgggggatgcgctgtataagatgtttagctgcatccctgactcctacctcctagatgccattagcaccctcccctccagatgtgataaccaaaaatgtctctagacattgccagatgtgcctggggtaggagggttgggggaagtggggtttgagaacccttagttgatcatgcctgcagtaggttgagaagcatcagaaagctaattaattagacaggaatatgtgtttgcagtaagaaaacctcagcaaactaatcaagttccaaagttactgcttggtaaataaataggaattaagaataagaccctatctctgtgtctggggtcattctcttcggagctcttggtggagagacagggttcccagtttcaattttttagtgcttcagactgcccttttcagttataattgtaacaaccttcactccaggtggggagcctcccaggtttatttacaacaaggctcaatctctgattattttggtcaaggagatatgacactctataccacacacttgagaatattgcctctctttttctcttgagcttttagggttggaacgtgacaggcagataaggaattttttgcattaagtgcaaagtcctttttcttatagaagagcaataatctgcacactagatcaagtcaagtgtggatataaaattataatttttggggggatatttttaatagtggttttgggttaaacatatttcctttaaatgaaatgtctgtaggcctaaagtaggttctaaatgttgcctgtactcatagtataccatataaaatataatccacatttactggaactaccatatattacttaccccaaatcaatcaatcccttccctatcacccccacgtaatatcttcgtattttggatacctgtgaatcttagatctgttcagttttccattatccattgtcttatttcaagcttctcattcagaatgttgctttggagtattttctgttagtaaacacagggcctagtgactctaggacctgctgtgtgacttaggtcacccacttcactttattagaatctcaaagaatggtgaacagctgagttccaatctgtctcatttggctctcatgaaaacagtcataaggagattgtagataaaccacattatatagcatagtaagtgataatcaaccccatttggcagttgcaaccccacaagagatagccctttttagatttgtgtaggagtgaaaagctttattttccacaagaggaacgacatagtaagaactccttttccccctgcttctgcaggtatatgcttatgccctaggcaacttgatgggtaaagttaggtttaaatagttttatttgtaagctcttctcttctcttctcttctcttctcttctcttctcttctcttctcttctcttctcttcttttctttcaagacagagtcttgctctgtcacccaggctggagtgcagtgggcgaccttggctcactgcaacctccgcctcctgggttcaagagattctcctgcctcagctccccgagtagctgggattacaggtgcccgccaccatgcctggctaatttttgtatttttagtagagatggggtttcaccatgttgaagcattttatggaaaggggttaggaggaggaagacattggttttctttcttcctcatctgctttttgttagtgaaagaacctgctaagctaactcttttctttctccctccctctctccctctttcagttcttcccccctttccttccttccttcctttcttttccttctccccctttctcccaaaatatggcagactcttctgtcccctagtcattctcatatagtcttctgaacttgtttattttcttccctgttaatacagtaaaaattaactaagttggccaggagtggtggcacatgcctgtaatcccagcactttgggaggccgaggcgagcagatcacctgaggtcaggagtttgagaccagcctggccaacatggtgaaaccctgtctctactaaaaaaaaattgtaaaagttagctgggtgtggtggtgcgcacctgtagtcccagctattcgggaggctgaggcaggagaattgcttgaacccaggggctggaggttgcagtgagccaagatcgcgccactgcactctagcctgggcgacagagcagtctttaaaaaaaaaaaaaaattaactaagttaagtagtacttgggccctatcagatagtgtcctcctgcaggcaggctgggcccctactacagtttcacttttaatatctcaccgagattagctgactgaattgccaccagaggagagtgaaagcatattgcaaaatcataatcaggacatgtgagattatgtgttgaacaggtttaatgtgcttgggggtcagtgactaatgggaacttagcagtcattaactgtcattaaaaacgtttgttaattactattacacacttagagatttgttaattaacaaagagtaatgcctttgctaatcactattatgcacttaagaggaagccagtgggtatttttcccttcatagctttctagtacaaattaataaaatttagaaaattagaaaatgattgtgcataaatgtgtataatcatgtatctgttagggggcaaaaattagttggggaattatctttctttgataagtcttatcattagtttgaaaatggggcattggcaattcatactgtttggctgggttgtcctgagaaacactccccagtcaattctgtttttgcaactctttggttgtgaacaagtgactgccctgtgagctgcaaataaggagaactgaatattcctgaacagtctgtggcaataaaaatgaaatccagtaagtgcaaatggtatgtattcaacaattgcgtagttaggtcctgcaaggtaattagacataaaggataagtatttaatcaacaatatagtagcattttcattacctagtcaaatcaagatgttacagttttccttctcttgttttgttatttaaaaaatatctattgtggccaggctccgtggctcacacttgtaatcccagcactttgggaggccaagatgggtggatcacgaggtcaagagatcgagaccatcctggccaaacatagtgaaaccccgtctctactaaaaatacaaaaattatctgggtgtggtggcatgcacctgtagtcgcagttactcgagaggctgaggcaagagaattgcttgaacctgggaggaggaggttgcagtgagctgagatcgcagcactgcactccagcctggtgacagagcgagactccatctcggaaaaaaaaaaaaatctattggttattgttggtgcattttaaccaaaaccctttagtttaaccctaacctgtgctgagctctttaacatttacatacatattaaaaaacagaatcagcccagatttcccaacatattaagtcttctccttgacttaagctactttcagttcttcaagcttaagtcaccctgtggttttgtcttaggccaaatattttcccctttgtctccccttctgtctatcaagccaagcctgcctgtgggttttggatagtgtgaccatctggctttcttgaaggggcacttacaggggaagttttattgcccaaaccggtggacaatccatgtcaggaatgattatatcacactgctttctgggtttagggcttggaaaaacctgtatcagagcgtgggccctagggaagaggtaaaaagagaggagagggaagaataggtctgtttcatataacgagaaagtctcatggcagaggaatggatgagattcaagttacaggctggaagagcttcatccagaatcagccccggggagaggagacctcatcacgtcctcactaaacattcactttcctctccacacccagttaaagtaaagcaaatttacttccttggtgaaaagcccagccttcaaggtatgtggacttacccacaaaatctcttggctcactcagtttcacttaccatcgtttaatgaggaaaaagttcttttgtaccatgtaactgctgacctgagagaagcccattatgatatagagttataggacagctggccaacacactatatagctaaaatcagggcctctctgttttgatggggagaaaagttagagaaggaatctttagacttcaaatttcatggctcagtaaaacgtcaaaataattttgaagaccaaaggggttgccagcttactaggctgcctagacaggggtgggtatgaggggaagaaagcctgcttctttcatcaacagcatatccagaaacaaaggacatttaaacactaaaaaagtcagaaggacaaattctcagaaaaaaaggacagtcctttaaatgggttacatttagctttataaaatgccctcctgtattgtcctaatctttctttgccaaggtcaagtgcttgggtgccattggattataagcccctgggtttctgaacggtgggggagggaaccacaggaacaagggttaggggtgaggaaaaagaactcattaaccttgggccctgggtggaagttaattatcatgtcttgccctgtgggtgggttgaagtaggaacgttaattccaaaggcagttttccaaatttttgaacttgagatttgtaatattatcttgccagttagccaccagttctcttctcttttttcttttcttttcttacagtctcgctgtcacccaggctgcagtgtaatggcgcaatcttggctcactgcaacctccgcctcccaggttcaagcgattcttgtgcctcagcctcccgagtagctgggaccacaggtgtgcaccaccacacctgactaatttttgtatttttaatagagatggggcttcaccatgttggccatgctggtctcaaactcctggcctcaaatgatccacccaccttggcctcccaaagtgttgggattacaggcatgggccactgcacctggccaactgccagttttctagtaatggttaggttgatattttagattcatttttagagtttattatcattttgctgttatcataagagaagttccatcatgtcaataacttgtattaggaaagacatcttccattcccggtatatccaactctcattcgtataactgaaggctgtgtgtatatcatcaacaattcttgcccttttgcccttggattgcattatatgctgtgtgcttttttttttttttaaattagtaaagcgtttgcatttcctgacagtgtgccacttgacagctggtttaagtgcctgggagaatagtaatcagtggcaaatcagcttgtgtctgaaatgtggctgttggcagtctacttgaggataattgaaagtttgctgtattcgttttattgatgggattctaggtgaatgccaaactcccgattgggaccccagattacatggctcctgaagtgctgactgtgatgaacggggatggaaaaggcacctacggcctggactgtgactggtggtcagtgggcgtgattgcctatgagatgatttatgggagatcccccttcgcagagggaacctctgccagaaccttcaataacattatgaatttccaggtaaagagtccttagaagatttcgaagtcacattgagaaacgttatttaaaaattgtgcgaatgaggctgggcgtggtggctcatgcctgtaatcccggcactttgggaggccgaggtgggtggatcacgaggtcaggagatcgagaccatcctggctaacatggtgaaaccccatctctactaaaaaatacaaaaaaattagccagttgtggtggtgggcgcctgtagtcccagctactctggaggctgaggcaggagaatggcatgaacccgggaggcggagcttacagtgagccaagatcgcgccgctgtactacagcagcctgggcaacggagtgagactccgtctaaaaaacaaaacaaaacaaaacaaaaaaccaaaaaattgtgtgaatgaatgtttctagaatgttgtttaaaaattgtgttcatgaatattttatacgtattgtgtgaatgaatgtttatagaatgttagatgttatttaaaaattgtgtgaatgagtgtttcagcagtggtggaaaataataatagcaaatacttatatggcacttaactctgtgccaaaggctattctaaacattttattaattgtatttcacggaatctcagctgccagtaatgataagactacaccattattttatgtactgctacggaagaaaaactgttgccaatgagtctatgatatttttattgattatagaatgcatcttgatttcagtgctgttaactgtgaataactgtgagtcttagaattgaggagatatagtttagtcagttagttaatcttcaaacaaccttgtgaggtaagtattattattttcatttatagatgaggaaaccaaagcactgaaggtgaagtaactggcctgaaataacacaggcagtctggccctgaagtccatgctcttgatttttcgatatactccttcttagtactaactgttgaatatggtattacaattgaatgaggaaatgaattagaaatacaattacatatagatatgtgttttactgtatatatatatatatatatatatatatatatatcagtaaaactattttctaataactgtgctttctactacattaagcctatttttttttttttttttttttttgagatggagtcttgctctgttacccaggctggagtgcagtggcacaatatcggctcactgcaaccctgcctcctgggttcaagcgattttcctgcctcagcctcctgagtagctgggatcacgggtgcccaccaccatgcctggctaatttttgtatttttagtagagatggggtttcaccatgttggctaggctggtcttgaactcttgaccttaggtgatccgcctgcctcggcctcccaaagtattgggattacaggcatgagccactgtgcctagcctgtgaagctcatttcttaaggctctgataaatgtatatgttttagtttcaaccaaaaggaaaaggaacgtatttcctagatttttgtatctcacctaattttcatctttctggaatgcttaatacatatttttatgtacatacattatttgttattcttgagcctcctcttgagtgaaaatttccccttagatgactcttggagctaatttatttccttccctttagctcactcactcattcaatcattcaataacgagtgcgttatcataccaggtactgttaggtagcaggtttacagggatgagcagaagaagcaggccctctctgccttctttctttttcatcacactgaaatcacagcgcattgtgtgtgtgcaaaagtagagtgcagagggaacatgcagaaaggagttataggatagaaaaggtagccaaggaaagcagcaagaacagcatgatttgttcagggatctttaaatagctcatcattgttggacagcaaagggagagatggggaacgtggcaagatgagatgagaaggggagccggggtcaagccatggaggacgctgaacccctacaaaggaactaagcctattgatgtgaacaggccacttattttgggaacacgcctttggtccaaagggaagagggcacgaaacttccttctctaaaaaacaaaaaaaaagaaacttgcatatatgagaaatactttcttcactttgcagcatgagaaacggaatccctactaaggaaataattctcttattttttttggaacagcggtttttgaaatttccagatgaccccaaagtgagcagtgactttcttgatctgattcaaagcttgttgtgcggccagaaagagagactgaagtttgaaggtctttgctgccatcctttcttctctaaaattgactggaacaacattcgtaactgtaagtagggctgttttccttaatttgggatgttgggattatgaaacactcaagagagatctgagattgttctggcccaaagaagcttctgtaaattacataaataaaggctttaattatctacaggagtagtaaaggctaatgatgtagctgtctttgagtaataattctgccttaaaattgtttgtgtagaactgggtcatttatcaaactctgtgtttatgtggcctttagaatattatccctcagtaagttagaggcacagattaatggagtttgaaggttgtcacttggtttgacacagtttcttccaaaaaagtggatctaggtatttcattcacatatcaggaaaaagactcagattaggcaacatgcccaggttgttctgctaatggctgagtttaaacaaaaaccataaacacctccctgtgtttattcatttgtttccctcgataatatttgtctttgctcacaagcatgtaaaacctataatgtatatgcacagtagattcattcatacatcactttttataatcagttagtgcaaactgaatgaattcattaaaaacaaagacctggtttattatcaacagaaaccacacaatgctcttttttcttttaccagttggtgatcttttaaaaatccttttaattcttggatgtgttgttgattgaatgtgttctactgaatgatcagcacggattagagccagtaggaaagcagttatcctgtttgagtatgtgttttgtttttggtgatggagggaggttgggaaatggaatctgtttctaggtgtcaaaaccaggcttctgattggagatgtgttataattataattgcttgcaccttcagctaggacatagtatggtaaaaaatcagtattgtccagttgtaaaccattttgatggtttctctaaccttctgctgaaatatttaagtaggtcgcatttccataaatctttcttggcaaatgtttttattattcgggtggccacattgctttatttttctaaataaatagacatctccccccaaatctccaaggttcagaccttctaatcagtaatatattttcagggcattcttccttttatgcttttagaaagatgtaatagactttcttttagatgctgttcaagtacttaatcttttcttgtcttgcctttttatctctgtaatcttcttgaataagcagttaattttttttattcatgaacctgctgatcatgtctaagaatgtatctccacttaagtaagtcagtgaatggtgattacctgagtagagttaaagtagtcccccaccctcctatctgtggcacatatgttccaagtctcccagtggatgtgtgaaactgatgatagtactgaaacccatctaccttttttcctgtgcatacatacctatgttatataaagcttaacttataaattaggcataatatatttgactcccagctcccagtgtagtggctctgaagactcacaaaatgtatttgctttaaaaaattcttttttttttttttgagacggagttttgctcttgttgcccaggctggagtgcagtggtgcgacctcagctcactgcaacctccgcctcttgggttcaagcgattctcctgcctcagcctcccaagtagctgggattataggcatgcaccaccacacccagctaattttctatttttcgtagaaacggtttttccatgttggtcaggctgatcttgaactcctgacctcaggtgatctgcctgcctcggccttccaaagtgctgggattacaggtgtgagccaccacgcctggccaaaaaattcttttaatttaagtaaatctttatttatttacttttgagacagagtctcactctgtgggccaggcaggaatgcagtggtgtgatcacggctcactgcagcctcgacctcccatgctcaagcagtcctcccacctcagcctcctaagtagctaggactacaggtgtgtgccatcacactctgctaatttttttgtatttgtagagacgcggtttcaccaggttgcccaggctggtcttgaactcctgagctcaagtgatcctcctgctttggcctcccaaaatactgggattacaggcgtgagccattgcacccagccctaattttaataaatcttttattttggaatagtattagatttatagaaaagttgcaaagatagtatggaagagttcccacatacccttcacccagttttccccaacgttaactcttttttatatttatttatttattttttgagacacagtcttcccgtcgcccaggctggagtgtggtggcacgatctcggctcactgcaacctccgcctcctgggttcaagtgattcttctgcctcagcctccgagtagctgggaccacaggtgtgcgccaccatgcccggctactttttgtattttcagtagagacagggtttcaccatgttggtcaggctgatctcaagctcctgacctcaggtgatctgcctaccttagcctcccaaagtgctgggattacagacatgagccaccgcacccagcccccagtgttaactcttacataacagtgtcactgtctaagtgtttgaaaaactatttgtcaaaactaatattggtacattattgttaactacacttcagactttttttggattttaccaattctcccactcatgtcccttttctgtttcaggaatcaatccgtggtaccatattgcagttagggtgtttatatttgatgggactggtcctagtttagatacttagtgtagctcagccagcaggtgggatcttcatgcccaccgaggattggtattgtgttttcctggtggttttatggcatttccgactatgcagagaggcatggtattaacttcagtgtctcctagcaaattttcctgtttttcaccaacctctgatccctgcattatttgcaatcaactcagagatttgtgattgaaaacattgcttgactccatgctctttaagctattttctaactaggtaactgtaacataaattatgcttttatctagcactgtttttcataaacacatgttgagtgattttcatcaaccgaaatacttcgaatcattaagtttcccaagttcatggatgctgcttaaatgcctggtggttccaggctgtcgaatatttctgccttctgcaataagagattgtcccttgttaaaagcaacattagcctttgtgcggtttcacccccaattcttctttttcttgttgtaaccaatgaaaggaagtactgcttaacacagcaggtaataatcttctaaaactcattatctcaagaggtggtcctggcaggatatataaatgcaatttaagaaaggtcttggcaaatttatgaatgacagaactgggagtggctaccgagagaaactaggatgcgcctttgctttgacactgaggtcaggcgtagcttctgtaccctcctgggtcctgcctcttggggttgctgcaggcagcaccccatgaaccaggcatctgacccagttccaggatacttattcttccagcaagtcgaacactctgtgatgagtgactgccatgctcatgggtcaccaggctctcattattctgtttcatttccagcctcccacaagattggtttttcagctgcttatttattattatcattatttcaaggctgctttccaagtttcagtggggggtttcctaagcgtaccagctgccctggttgtgcagttccggcgatgtttcagatgctgggccggattctggctgtacccagcctgatctttctgggcttcaggaaagctgaagccaatcagagctcctctttcatgcctttgggattatgcttaccttgcctggcatcgtgtacctgctcccatccatgggaaagttttgctgtctggtactgtcttctatcaacatcttttaagatatcttcccccgaggcatcgtgatgtcaacggaaccagcacacttgtacgttttatgcaagactgccatatctcaacagtgagaaatgcataatggaagtggtgatcacggattatttcctaggacattatggctaatgcgctagagaactcggatggtctgttgcgtctgacatgggctttttctcttgagttgtctttcttttgctattctctgaaagaaacaattcttgccacatgatcctgatttttcaggtcctcagcatttgttagcagaaagtacactttgtttccatccggcagtgactcagtggtggtcccatgctgatgaaacgctgagatagtcttcttccaaataggtatcgttttgattgttgctgcttatttgctagctggccctcaatagtgacaatgaaacctcaagtgtataatatggttgctcagtaatcctgagggaagacagtctttggtttgggggatagggattctgtgcctacttagcttcaggtgaaagtcttacaaatttttgtgtgtagaaataagcaccatgtacctccttgggttttttctttttttttctagtcctttagtatggtcaacaatattgtttagggagtacctattctgtgctaaccactaggcattcaagtatattacactatgctccttcaaaacacttctgtcaaatgtaaggattattatacccattttacagatgtggttactgtggtaacttggccaaggtcatagggcaagtgaataagggattctggatttgggtggaggtctgtgtgattccaaagcccatgctctttctacaatactatatatgcctttgcataagttattgttattagtaataatatttgtgatgatggcaaataataaaccatgtcacactagagagtgatttaatctctaggtctatttaagaacatttggaattgcaggaattggatttttttttttttttaagtgatggagtcttgccatctttgcccaggctggtctcaaacttgtgggctcaagtgatcatcctccctctgcctcccaaagtgatgggattacagatatgagccaccatgcccagcctagaattgcaggaatttttgaattgatgattcattctgatatttgaatttctacagtatgttaagtgcaatgtcaggtgctggtgctgtggctccattgatgaacacatttgggtatggccctaccttcattgaatttagagtctaagagcctaaccggtcttttgcttgaatagagctgtagtcctgttaaattgctgtacctccaaatggtgggaagtttaatgcttcgtaggcctcccctcactagtttactgaaccacatgtgcttgatttttttttgagatggggtctcgctctgttgcccaggccggagtgcagtggcgtgatctcggctcactgcaagctccgcctcccaggttcacgccattcttctgcctcagcctcccgagtagctgggactacaggtgcccgccaacacgcccggctaatttttttgtatttttagtagagacagggttttaccatgttagccaggatggtctcggtctgctgacctcgtgatccacctgcctcagcctcccaaagtgctgggattacaggcatgagccactgtgcctggccccacatgtgcttgattttaagcaaaatacagactataggctgtgacctggtgatctcttccccacatacagcatcctgctaacctataactctccccatgtctcagatctagcctgggaaaggacaatgttggatcgatggcccacttctaatcttgggatttctaatctcaagatgagttgagaagactcaggatgtgtcctgttttctgtttatttagaacagggtttctcagccttggcactgttgacatttggggccagataattctttgctgtgggggctgttgtgtgaattgcaggatgttgaacagcatcgctgtgctttctccatggataccagtagcaccctccccctgcagttgcaacaaccaaaaatgactctagacattgcccagtctccccttgggggctacagtcaccttcagttgagaaccattgatttagaagaattggccaggttattatcaggagagggaacatcacagtaatctgaatctctcaatactgccactgttactgttaacgaacagcaaaactattacgtggaggcagtaggaccttgctactcagagtgtggtccgtggaccggcagcatcggaatcatctaggagcttgttagagcttcagagactcaggcctactgagtcagaagctgcattttaataaggatccccaggggatttctgtgcatattagagttgtgaagccctgcaagaggaagaaattggatgctagcctcagagtttcttgctcatctttgtgggtcttcctcgttttgtcttcgggcttaaggtatggggaggccactttttggctcaggactcctatgggtgaatgggactgcttagaactgctgggttttaggccttgctttgaggaatttaaagcttttctcttagatggacattacatcgttcatatacttcaaaatggtggtttgacctaatctctgccttctgatagcaaaaagatatttccttgactccctgaaccccactttactgttgtcccatattggattttaattaagggtggaataagtattcttcactaacatgtttatacatgtatgatattaccatgccatttattgagtgcctagtatgtgccaggagctctgcaaagtgctttatgcttattattgttccatttattcttccccaaacctctgtgaggcaggtcctatcactagtccacaatacaaatgaggtcatggagcccgaagttggcagtggtaggaatcaaactcaggtctccctgactctaaattctctttgcctttgtttttttgaaaaagtggtatagcccatagcagaaaattcacattatacagaaggttatacggcgaaaaatgcctccttcccaccccacgctcaacccctctccctcaagcgaaccactattgtcagtttctcatagaactttccagaatattctatgctcctataacactagcacaacctatcctcttaacaacatctttatgctgcctcccaagaattcagtaatttttttttttttgagatggagttttgctctagttgcccaggctggagtgcaatggcgtgatctcggctcattgcaacctctgcctcccacgttcaagtgattctcttgcctcagcctcccgagtagctgggattacaggcatgcgccactatgcttggctaattttgtatttttagtagagatggggtttctccatgttggtcaggctggtcttgaactcccaacctcaggtaatccgcccacctcggcctcccaaagtgttgagattacaggcgtgagccaccgcacctggccaaattcagtaatttttattggcaggttattttcccgcatcattgaaatgaatgaagcaatctttatacttcattcatttaagcatggccctaccatgcttatccttcgaatctgccactcagccattggtttctgataagcagtgctcttctcaaatgaaaaccccttatggcttttttttttttttaaacaaggccacaggtgatatcatgattttgacattattttttcatttattttgtttagtgtcctgcctttagaattgcattatctcaatggcttgtgcatttagtgtgtgtgtgtgtgtgtgtgttgtgtgtgtgtgtgtgtggtatgtgagcacgcacatattcgttttgggccctttttttttttttttttgagacagagtcttcctctgtcagccaggctggagtgcagtggcacaatctcggctcactgcaacttctgcctcctgggttcaagcaattctcctgcctcagcctcccacgcagctgggattacaggcatgcgccaccacgcctggctaatttttttgtatttttagtagagacgggtttcaccgtgttggccaggctggtctcgaactcctgacctcaggtaatccgcccgcctcggcctcccaaagtgctgggattacaggcgtgatgttttgggccttttaaagttcatcttgtttgtgtattcatttgtttggggccttttaaagttcttcttgtttgaggcttcctgtcatttgaagggttatctggtcatgttttgttttctaagctagttccatgaggatcatagatatgcttctctgttaggcttggttggcccttaaacttgtcttccttttggacactcacttacttcaggggcaggaggaagtgaggaagaggagttgggtctgtttggagtatcagcatggacgggaaggggagcaagagggatgggatggtaaagtagtgatggtagaaattcaacttactagaccaggagcgtgtgggcgccacctactaaaacaaaaaaggaataatgaagagctatagtcagtagctcttataatctcttatgggatatgtaggcaaatatttatgtgtctcttgggggctgttctgtttttagaaggtaaatgattggtaagaaaaaataggccaaaaagagctaaatgcttatgaattaggattataggattttcccccactagtctgaatttagaagctacttccagagatgtcaaaaatatgtaatattctactttattccaagataaattgagggcaacttattctagaaataattgcaatattaaaaatataacaatgaataaatagagaaatctagatgaaaggagtatgaggatagggaaataaagttagggttgaaagtaaaaacaaggaagttcctgttaagttgccaaaggaagaatgatttgggactctcagtctcccagtgaccaaagcagaaaggagaatataaacagttacaagagccccagtcgcatgaaaaaaaagtccagaatgctctgctcagaggagacccaattttctgaatactgagccctgaggaatttcaccactgggtttcccataaatgagaccccctgtgacctggtgggccccatccctcggaagtgtaccctggcatttccataggactgcttccttctgggcctcttagtgcaagccagcagtgcaatgccacatccaagtttggtaaatcaattctaagtgagataaattaatgccttttttgggggaagatgggaaacagagtgggtttgttggagagcccataaattggagtcttcaacccttaaattctcacttgcgggaaaacctttcacaaccaagcaaacgtggaaatgatttggccaaagattcaaaattatattaaacatctgggactatattcagcagccaactttctaatcaattctatgagtgtggtgattgcagttatgctcattttctgagggtgaagtttggatagaactaaaaagggcggttggcaggaatcaaaagagatgaaagcctcaggacaaagagttagaggcccaggtggttcatgactgagagtttggaaatgatttctggtgtctcacttcagagaaaataaatatagccaactctgttcatccgtggtgatggaacattcaactacagcactggcagtttgggatctaagaccacccttccagcacttcaaaattctgacttataaaggacacacacaaagaacagatagccagatagagaccaaaatacccactttattcttggcagggcaagcacccagtaagctctgatgcagggctctggtaaatttgcccatcctaccaacagagaagaatggtggcctcccctcatgaacggggtcggaggggggccttgccacaacagggggcctgatggaaataagggggacaagagtgttcggttggttgagtgcctgctatgcctgtgcctaggcagtaaaaggggaagttttaagtttggcccttactttcaagacatagtaattctaccttctagtaaaacatggccaaataaatgtctgcttttcatgagccagataacctccttcttctttattggaggagtgagtagaagggtgagactagccgggtgcgatgtctccaacctgggcgaaagagcaagactccatctcaaaaaaaaaaaaaaaaattaagaataaatcttttcactgttggagaaaagttttgagaggccgaggtgagaggatcacttgaggccaggagtttgagactagcctgggcaacatagcaagacccctgtctctatcaaaaaataataataaaaaaagctagctgggtatggtggtgtgcacctgtaatcccagctacttgggaggctgaggtgggaggattgcttgagcccaggagttcaagcttatagtgaactatgattgcacccctgcactccctcctgggcatcagagtgagacactgtctctaaaaaaaaaaagttggagaaaaggatactaaagagataaaagggtactaaagagatcgggaaggcagcaaagaatgaatctagtctgatgtgttattgggtgtacgtaattcatggcggaaggtgctgaaagggaaggttgcctgggcctacagcaagcaggtgctgatgaactagctcctttgctattacttaaatgtgtcctggttgggccagatgtggtggctcacacctgtaatcccagcactttgggaggccaaggcggacggatcacttgaggtcaggagttcgagaccagcctggccaacatggtaaaaccccgtctctactaaaaatacaaaaaaagtatccaggcatggtggcaggtgcttgtaatcccagctacttgggaggctgaagcatgagaattccttgaacccgggaggtggaggttgcagtgagccgagatcatgccactgcactccaacctgggcaaaagagcaagactgagtctcaaaaaaaaaaaaaaaaaaaattcctggggaatatccaccagggtgaaaaattgggtatatccaaattcagctttgcaaagaaatgcactcatgactagttgcaatttgaaacgttcctcttctgagtatttctagcctatgtaggtgtttcacagattgctgagtacctagactgagagggagagaaaaaaacaaagtaaagctaaaatgttaagaagtctggttaaagtgcaatccagaagtgagggaaagcatctctaaaagtatgaatctttggggaaacataacttgattaccaaaaacttaatattaagcagcctcataggaacatggcttttgggtatggcgagagccagctagagctcacatctccattgaaatccaccaccagagaggttatctgcctagttgttggcagccagaccctggcattgtttagattgattgatggaaggctactttgggaatgctggcttccttattcattgactttaaagacagcattgtaaaaattgatcaccagcccaaatcaatgttaccctgaagtatttttatgactttttggggaggcaaagagatgggataatttttgatttatttaagtctattgcaaactggaactcctttgtcttctttttgaactaccttttttgtttttttgagagagagtcttgctttgttacccagactagaaagcagtgatgcagtcacagctgactgcagccttgacctcccagactccgatgatcctcccatctctcccatgtgcatcaccacacccggctaattttttgtattttttgtagagacagggttttgccatgttgcccaggctggtcttgaactcctagactgaagtgatccacctgctttggcctcctaaaatgctgggattacaagtgttagccaccaggcccggtcttgaacttcgtatatacagtgtgttgtgtgggcaagtcatgcctgaccacttcctagtgggaggggagaaactagagggcttgcctgaggctttaggcaatgtaatctgttctcttgggatcaattacttatgcatatttagtagccagctctatttgctgatcacctaatctgttctcttcgttcattcccatgagacttcgatatgggatatcttcctcttcttcccattgcagccttttctctcagagttgttcccatgataagaactcccatcaaaatctctgctctaacatcagttgtcagattttgccacttttttttttttttttttttctgagatgatggaatctcactctgctgcccaggctggaggcagtgccaccatctcggctcattgcaacctctgtctcccgggtttgagggattctcctgcctcagcctcccgagtagctgagattacaggagcaccccaccactccaggctaatttttgtattttttttagtagagatgggctttcaccatattggccaggttggtctcaaactcctgaccttaaatgatctgcctgtctctgcttcccaaagtgctgggattacaggtgtgagccactacgcccagccacattttgttacttctttctgtaacctgaatgtggaaaaactcactgtctttcctccactctcacaccataactgtcaacaccacagaagacttctgtgaccaaatatgtggtcaccaccaagcaagcagtaagttctgcagtggacaccactaggcgtcctccagttcagttctggcactatccgcctggagatagggctcaatcccacaggtggaggtctcagtccccaagaatgtcccctcttcaggcaccagttgcaagtccaggcctctggaacttctcgctgactggcttcaaattggggttcctgcagccccctctttgagttcaattaattggctagagctgctcacagaacttgggaaaacacatttactggtttattctaaaggacattgcaaaggataaagatgaagaaatgcatagggcgaggtatgggggaagggttgcgagcttccacgccctccctggtcgccctccaggaacctccacgtgttcagctatccggaagctctccaaactctgtcctcttgggacctttcatggagacgccattggataggcatgatcaacaaccatgtagaaatgggattgcacgaaaaggctatgatctaatcctcataggctgagtggggaatcccagcaaggcctgtttgttcagatccttctgtagcattcattcctccaggttatggggcaggaccccttctgaaatggggtcttctgacctacaatcagacaaggcagaggaaatttctttatggccagctccaagtcagaaaggtgggggaagattagagtcctgccttgagcagatgaaaggagggctggaggaggtcagagagagagagattctgtttttcaaggcctgcttctaaagcctaaagcacccctaaataacaaaagattgtaacaaggactatgggagtcataagccaggaaccgtggatgaaaacctatatatatgtatatatatatctcataataattcaaacctgtctcctgttaatcccatcctctctgtttctgttatcatttccttagtgtagatctgcctaagtgtagaatttgtagaatttgtcatgttgactattgtagacttgtcttttagagtttctagcactagcctcttccacccatcactattgagatgattgtatccgtctcagtactgacactaacccagcactctggttttacatctgtcaatccatcaagacttcactttcactttcttccctgcctcattattcactatgctcttgggccattgctctggcttctggggcttttctaaagtagcacttttccccactccagcccatgaagataccttttaaccagctcttgagattaaatcccctccgtgacactttcctgcaggaacttgcaaaaaagtactgcattccccactggcaaaacttgccatcagccagtttatgtattctctgcttttcacacccatatcttgacctctgaacaacacacatattctcctcttcatttatttcacagttctgtcttcataacattgataagtatgatcacattagcgctctagattttaagcaactggaagatagctatttttttggtactcttcctttaaatttgaacatagtgtctaattagtcaattaacatttttttaaaagggcgagggacatcatggtagagagaacgaagttgaacgtgtttttggttgaatattagcgcatgcccactgtattctaggcacagtcctgattcattatatcatcacacaataattatttatgtgccttcatcctttatgacacagtgctggctcttattcatctcccatttctgcaatccatggtgatgattaaaagtcttaggagttttacgaggctcagtattttttttttttaatatgctagttcttcatgaatacattgggtactctgaagcatatcatttcctgggtttcctgaagtggtatgttgcgtggaatggcacattaggtctaaataattatcccctatgtaaggttcttgtttttcattcattctcttaaaaaatagatattaaacattaaataaggacagccaggtattgtttgaggtgttagtgggctatgctaaaaaatcaaaggtgggaatgaggcagctggagctcaaaggagcatgttagaaggagtcccaagaggacaaatccatttggttcttctttccttgttttttttcgaatatttttgaggatgataatttttttcccctcaaaagcttttaatgaatgttaggattaaaaaagagagagagagaatttatagaagagaaattaactatagctcctaaaatagctctttgtttctgaaagccttgattctgctatctattttataactgaaacaaaaacaaaaacaaaaacaaaaaacaacctcaagaagttacttgtatagcctctgccactaaggagactgtgttctgatgttacctcaaacaggctgatttattaaaatatttaaaaatatatatggaaatatttttttctatttttttttttagtggcttttcccagtgaacaataggtcttactatatgatttcttatttgtcattagtgaatgtggtgggtatgtggcagctgggggagctgatgatttcataatactgtatcagaaatgattagtgtaggtacttattaacatatttctcagacagaacaatcttgacttttaaaacctcttcatttaattcaaacatcaagtaccctgtttgtggcctgtgttatgttaggtgctctctttacaagacctattttcttgctatttaattatatatttgcttagcaaatatttactctgcacctactaggtacctggcactgtgctgtgtactgaggtgccatgtgtacctccatcaacatagactcaagatcaatatgatttcagtgaactaaaaatacctttattgaagcaaaaaaaaatcacattttgtaaggatcaaaaaagagacattttatataaggtacaagaaatagaagaattatatccccaagatatatgtgataacatacttgttagtttttggacgtgaccagattttacacaatccttaaaaaatgcagcaaccagattttaaagtagttctctaatctctctttctgtgccccattagatgtatattggatcttctcattctgtctttgtcttttgacctctcatgttttccgtctctttgtctctgtgtgttgcattgtacacaaatgcttcttgaactgtggtgtgcacatgaatcacctggggaccttgttacaacgtaggttctgattccatgggtatggggcagggcctgagattcttagagaattaaattctaaccagctcctgagtggtggtgataatgccagtgtgtagaccatagcttaagtatcaaggttctatgtgattccctcagatctaactgctagttcactaagtttctcttcagctgtatctagtctgctatttaacatattcagtgaatttttaaccttaaattcaagaacaagactttttatttctggaagttcagtttggttcctttcaaatgtacctggttctttttcaaagtgtcatgttctttgataagaatttctactaatttaccttgataataaaaatttgtttcatggctcattttagattgttcttttatctgcagtttttggagggctaattctcccatttcttgtatctgttgttgcacccgtaaggtgtagttgttgatttttactttttaattgtgaatttatttctggtagggattggaaggaggttgttggggtgggggtggggtggggagaaaatcctgtgtgccctgggttgcaaaaacacccctacaagttgttctccacttgcatctgccagtgctccaagggctcagtgatcctggaccagtagtcatgttaatttcttgaattgtaacaggatactgtaaatgtggacactctacctgaggttactgcttctttctatctgctttatttccttcccactgaagggccctggacaagggtaaacatctcatcactttctgggtggcagaatatttccagttcccccacttctttttggcttaaggctgtggctttttcctctgcctgaatgtggccctaagaagcccttcttttcaaactttcctgttgtacttgaccgactagctgtctagaggtttatatccctagcttttaatctttgctgtgaatatcttacctgttaccagctagtatatttcacattgacttctctttccttttttttttttttttttttttttgagacggtgtttcgctcttgttccccaggctggagtgcagtggcacgatcttggctcactgcaacctccacctcccaggttcaagcgattctcttgcctcagcctcccaagtagctgggactacaggcatgcaccatcacatctggctaatttttttgtatttttaatagagatggggttttaccatgttggccaggctggccttgaactcctgacctcaggtgatccacctgcctcgccctcccaaggtgctgggattacaggcatgagccactgtgcctggcctacttcttcttccttttaacttgaagattatctgcccctttttctaatcttaaccgcattaagctggctttgagcatggcaagagttttatagatgaatcttattttatagtacaggatttcaaaatcataattatttcactgagggtggcttttactctccattaattatacttctcactcagaaatggaattctattttggtctcctaaagataaattagtatatagtggaaaggaattataaagttctgctaggaattaaatgatatgattaacacaaacatccacatggatgtgtctctgccctgtgcaggaaagatgaacattcagtacagattctgctctatgtcactagctttcaagacctgcaggttctctcctaagcatgcaattcctgtgagcagtagcaataatagcaggtcatatttgtggagtgattactgtatgctaagaactgtggtaaacacttttatatggattattttatttaaacctcctaatagtccattgaaatagatattgccatgttgaaaactgaggttcagagaggttaagtgacttacccagtgtcacagaactagtaagtggtggagctgggatttgaactgagattccagaacaattgccattaaccactttgcttccatattagtatcatctgcaaatctctctccataaatttcctcagtctttatctgagtttccttatttcaggaaggaaaacttctgtttttgatccttatgaaatacaatttccattaaaactttttttttttgctattaaaaaaggtaccggataattgaaaccagattggatttgagcctgtgttgatggaagtacacatgggatgtgggctgaagtgttcaatctaatttttctttccatcagctaatttttaaagtattaagcaagtagattctgacactaacagggaagatttaaattctcttgagagactggaggtgttaaataattttctggtagtgcacattttacatcttaaatcttcctcactctcccacctcatctcaatgtacctgaagctctgggaatgttcttttgtacttctcaggaacagccagacctctggcttcatctcctctcccctccacatccctttcctgctccaattacttcccagcgccacttggatgttgttgtcatcggggaactttggaaacagccagatttttttggagtctgtaagcagaaaacagactgcttgctgctcatatctggcacccagctttgtccagaaaacgaggagttaaaaagaagtctgggctgtgaagggctgtgacaactgtcctagggggagctctagcgagccctggcgggcagtgactcatgctgctctgtcactgggatcagcactggcccctggcaggcaggcggcagccaggtggggttccagccagagcacgcacgcacggagccgggagcatgcagcctgcactgcgggggatgtgatgctcggctctaactcgcctggctggcccgccacggacgcctcagcttgcaaccatggtaacgtttctggcgggggacacccccgggagcccaccgcgatgggcagcctcctggtgactgatggacgagtgtccacctcccagaccgagagcgcttagtaggtcggaggaagtggagaggatgtaacacgcccccagccgggagtgaagccctgaggaggtaggagccgcatatgtccatccgtgcattcccaccgtcagcgcgcaggggtgctgtagatcaccggtaggaactttatttggctggtgcttcattatgctgattaaactgcagtggatttgatgggcatgattgcgctggggaagatgcataatgaactaaaaaaaaaaaaaagtggttaataagatctcggagtcgacttgtccgggtatgaatgaagtagactgcagtggtatcctaacaggagttccagaacctcacacatcccttttcctggtccttcctcttatcccggttaatccacgaaatgtagaagttccatcttatttcaacgattagtgctaatcattaataatttagacctgtctggaggagggaatccataggtttaggtctcctagcatcctggcactagccagcagctgctctgtaggagccttctggaaacagcaggaaggagcggcttccccacgagttccccaagtgctttcgttggcccaagtgctttcgttggcccaagtgacctgtttgagtttgctcttcagtttaccccaggcgggaaggcagcctgtctgcgggttggtggccatgttggcagagaaggggttaatctcttgttgctgtaggagccgaggttgcgagctagattgaaagcaggcgctgcagtgccatcgccagcgccgaaggagtaagacgatcttctccgcaacagtgttgaatccggctgaaattttttttcctccccgcctcctttcttgtttttctttaaccagctcctccccccttcgttcccaccctcaagtctgacgatgacacctccaattttgatgaaccagagaagaattcgtgggtttcatcctctccgtgccagctgagcccctcaggcttctcgggtgaagaactgccgtttgtggggttttcgtacagcaaggcactggggattcttggtagatctgagtaagtgaaaatttgactttctaaagggacctgcattgatgcaaggcttttggagccaaaggtggtggtgggggggtgggggaataggtggggggagtgcagtggagggaagctgctagtcacctgcattgggaaagcagtctacctgttagggctttgcgggggtagcctgttaatattctcattttgcagtgtgtaaggtacctgttcctgtctgtggtatgataattgtcaattgggtactttgggttagttttccaatctttggtcttctttaaaggggagagagtgggagatttccagcagtgcagatccccggtcaaaggagaaatgtgcaggagttaagatgagctgcccatctatctaaccatctatgtatctgtctctcaagtgggtggatgggggttgctatcttggctgtataaagaatcctaaaaaccttgtctcataagctagaggtttcctgatgggtttaactgagctgcaagtggctgaaccagagctctaacagagagatggtgctcggctcctctccaagtatgctgcaagatcagggatctggcagctgagcctctctgagctggtggagcgctggcagccagagaaagccccgttactgtgagccaccaggagggagtgtgatgtagccgagtcattgattcacagaaactgggcttcatagggggaaaaaaaaccaggagactagaaaatggaaatataaatatcactgtaaacctcttgatctggtaggtctttctccattctcataaaagctattgaaaaatgcattaacagagcacttggaattagagggtcgaggcttccaggagcctcctggaatttctgtaaaatgcagtagcttctgtggatgtgggaggtcagtatcttgcctcattctctcatgatacaatgacattctgttttcagaggagtgagttccccagaagatcttggactgatggtgttatttgccagccaccctggtccctgcactttcaggttctcagagggtaatgttgggttagttgctgcccacttaggagacgagcagaatttgatattcttcttggcagcatctttccctctttgtggtatttgtagcttagatatcgatttatagggatgttatgttggttcctggatggtgtctccctatgggtgctattttgacagtaacgttcctgaaaagatttcagagtgttgtggggaattgggcatttgatacgaaataaggttgtgggctgtgattgaatgtgagggaggtttttatgttgcaagatgttgaagtggtctttcttgatcccctctctgggggctgggtttcaaattcaggttggattttggtagtgttagatgtgcctctctgtctgatttgctccacaaccccaaagcaatctggatggtggtgggagaggcagagtgctaactagctgttgaatgtgccatcagatgggtttgaaacggctcagcaggattgggaggttttgccattggcatcaaagagcagggcagaagcggaggcctgatgttgaaggatgcatggttagtgggcagtataaccttgacacacgcagcacactgaaggtcacacgtcgtactggaaggacgtgtggagagttctagttctggttagcagtgggctggctgggtcagaatgcaagcttgcttgggtgttggtcagtgatctgaaagacgagggaggattcgagggagttagatttcaggggaaaaggcagaatgatatgggagatcttaggcattgcaattaatctgaagcagtgtgtgattaattgcttatttttcaggaagacttgaacgacatctttctgtttctcacagaaagctcagtttagggagctctctgacagggacatctcagtattaaggctgaggcactcgataaatatttgttgatttaatttacctatgatcctttcctccagaagtgtttatattgcttattgtatttgaagatgtgctatctcacctctggtagtttaaactatatccttagagcacaaaacgagctgctgttcctgacccaacagaatgtttaataagattcttatttcaaaaaaggtccatgcaaataaaactgtgtatttcttatttggacgatggcatcagagtattcctatcattggggaactttaacgttttttcaaagcttggcaacggggttggaatcagaaagattttctttcatcttgcgtcttgttatgtgttattgctattggacttggctactctgctgtaggcagccctgtgggtgatacctacaagcatcattttagaaattcatccacctgttggatgtagatgaccctggacatatcagattgtgattaattagaaatctaataaaagagaggcagtgatgaaattacttagcagctcctgcagttttattgacaaaatttacttggagagagggggagacattttctgggggtaccacctttgctgccagcgaccctgtgtttcttcctgagtttctttttcttttctcaccgttttcagcatcacaggtttttatttacacacattgattacctgtgctgttactcattcttcacaccactgaggaaattgcagatgctgctgtactgtgctaggtaaattgacctcagatttgttaccagtgaattgaatgaaatgttcagaggtggagctgaatgaacgaggagtttttgtggagaaattggcagtgagaatgatttaaattctgtgatagctcctcgttttttgggatccttattttgggaccccagactatttttaagccattgagtgcatcattattttaggctgagcaagaatcttgatgacagcgtttcaatggctgaggcgtagtgggagttccttgcagcttgagttggtgggagctggagagtttctagagaactaggtttggttgtctttggggtggggttatggtgaaattagtcttggagagtgagtagctgtctgatgcttcttttcctttttaaccagcaagagcccaaaccaaatccccaagctctgaatgcctggctgttcctctcagcctttctttgcttgaacttgacaatagtagggtagtaacaggaaacagcatgttaaagttttaaaaataaaatagatctcagctcttttccttcccattagcaaggggtacatttatttaggtttttccttctagattgaggcactgcctcatttaagttcttggtgaagccgtgcatttctgcaaaccataagtataaactctagaacgggggtgtccaatcttttggcttccttgggccacatgggaagaagaagaattgtcttgaggcacacataaaatacactaatgatagctgatgagctaaaaaaaaaaaaactcataaagttttaagaaagcttacaaacttgtaagttttgagccacattaaaaaccatcctgggctgcatgcagcccccggggccttgggttggacaagcttgctgtagaaggtaaaaatcagttggttttatgtttttgttttaaacatgctggttgtatgcttttggaagagttggggaacactgagggtaatgggatcttgatggggctggaatttgtgggaagatggtgtctgggtaggctgtttttaggaaggggcactctcttccttttgattcagagatttttcctttcttttcgggtggttctgaaaacacagcgatggatccaggcattcaaacaccatggaggaaggaagagtggctgttgccattgcttcccgagttttctgggaaccagtttttggtgcctcttccttgctctactggggcttctctgcatgtcagtttcttcaactgcgaagtggaaggacagcgatacttttcttacaggacttttgcggggatggatgaaatacgtaaaacacttggtctagtacctggcacatggaaaagccttggtaaatgttcactgttgttatttttgttattactaatacactagtccatgtatgtatagtgtcctcctatacacaccaagagaatatggaaaggactcagcaatgattaggtagtccaaagtcataccagattggaaaccaagcttcccaggccctgggacttttctgctagagacacttcacggttctgaccaactacaaagagttaatatgcagttgccaaatacctgttggtaaaaggtggatgttggggaggagtggattggggaacagaattagaaggtccagtcccagaatgggtaccttcccatcaagttgaacaagtcaaaacaggttatgttgaaacaactgagagaaagtaaagcaaacaccattgctgcagaatatcatggtacaaattggacatctttgggagttagcggagtaaggcaaaatccagtgagggacgcttaatgggtaatgccaattcacaattcttgttaaattacattgctgatcttccttggaatgtctgtccattcccccaagtagactgtgatctcaaggcaaggctgggtcttattcatcctggttttcctggagcagtaaatacttgtgctgggactgggcttataagcatactaatggaaagtaaaatatttgggttggttttttaaaaagacagtggatttggatcagtggagaggaaggtagagggaatttcaggtgggcagggtgctaacaacagcccatccttacagggcaccaactgtgttctaggctgtgttccaaccactttacacagatgaattcatttaaattgcacaaccagcccaagaggaaggtaccattattattctcattttggatgtgaggaaactgaggcgtggggagatcaaacaacttgcctaaagttatgtagctttgagtggcttagctgagatttgaaccctgtgggtataaacgccacagatgggaaatttgtgtggggtacccaggttcatgtgcttgttagaagtggaagctatttgtagagaatcacgaatgatgaggttggggcagggtgtgatgggagctgacaggcaggtctaaatgctgggattcattttcagtctctgtgtttattgagtaggtagacggtatagctcttggatttctcagattttttcctcttttcatttagagactcttatctggtgtgtgtgtgcccgcacacatacataaacccacgcgtatatactctttccctgaatgttcttatttgctaaagcttaagcttggcaaagagaggaaactgcactgaccttactctccaccatatcttcaggctgatcatacacaagttgcttaataagcatttggttaatccatctaaatcattcttatggctgcaactctcattttgttgatgactctactatctatgtctattcacatctacattttgtacttttgtttgcctcccatctgtcctgggatggctgataccagtggaagacagcctgaactctccaatcagtcctgtttcctttttatgaaatacttggaggttggaggatcttcccttaaaaagtgttttcctttctacatccagccaaaggctcttggtccttgtgcttgctacctagatccctattggaaagagtcttgcctgcaatttgattttttaaatagcagcaataacagagtcgtctctgctacacgaagacatgcatctgctgtatttcccagacaagttcaaaaaccttaactagcttctgcccatggttattgctctcaagtgccttgtgttgttcccatcccctcattatctggattagatgtttaacatttgcctgtgtgtgttgtgttggattttctcctctcctcttgctcattcaatttcttccttctcttagccaagcacagcttgttctcctacttgccttattctgttctctatttagactgtgcgtgcctgccttgcagccctggcaggaccattccaccgccttctcatttgtcttaaagatacctttaggaaatctaatccagacaatcctagcccagtcctgaagattaggctccagaagatctgtcaagtgtgttttttgctggcctacacatgctaatttgcatggttgcctgggatcccttaagaagacagtcattgactaaatggcgctacatgttcccaagctctgcgccagtctggcaactcttcctttgtctacgtgaatttctcctagttctttttgctttgcttgctgttcatctcctgacctctctccgacaaacttcctgaaagaagagcctgcactcaacacctcttttttccacctcttcaacaatactgaaatgactgtctcagaagccgttgattgtacctaaccaccaaatctggtgatttccatctcaccacgtgataccattaatactacctttcttcgagacaacgttctactttcttctcttctgtattatggacacttggtttccctcctacctctctgactgtcattctcactcttttgtggctgccatcaggctcttgcaatgtacgtaccatctcctcaagttccatcctcagttatctttctagttggttcttggtgatctcattcagttccttgactttagttcttacctccccatggcctcctcccatcgtacactgtgttcctcatcaccaggatgttttaccagtttctcaccatcccatcctctgttcccttcctacatagacagacccactcgctcactcagtaagccactaggtgctagttttggcttcttcattttatgtaagaaactaccaccttccctacccttctaggcaagaaagctgagtcatcgtaaattcttttctgcctcccccgccatcccatcagttgccaatttctccaagtggtgcctctaggatgccacttgcatccatacccatctttcttcctcattggcacccatcatggactcttgcttggtctggtgcagtagcctcctcagtgattcccttgcctctggttttcctggctgtaatccattctccacaaagggtggaattcttccaaagcataggttggatgatgtcattcaccggcttacaccttcaacagcatcccagtgtgctcataattaatggctgctcctgaacttggtattcagtcttggtatgccaagaccccagcctgccggctcatttgtgtctcctcatcccctactgaatcacttcaatagtgttgtctggccaagctgttcaaggctcattaaggacaggaccaggtcttccttcttttgcctgaaacagtgccttgcccctggcaggtcttcaatgaacatttgttgaattgaattagactaaaatggccagggattataccaattccttctgcacagtgtagacaactgctaatggaacctgttttctgtagagcacttcttgtgttcccagaactatgcgagtactttatgtgcattatctcattaaatcatcacaatctcactgtaactctatgaggtagctgatattatccccattttacaaatgaagacactgattcaggaagattagattattttcctgaggttctgaaggtagaaacacatctaagacttggagcaatatctggttgcctctagaccactgtactatctaccctgcctctaagagccatgactttgctagattatgcaggagttatggacttgtctaatagtaaaggtaaaagaattggttttaatgagaatctactcttctaggtactattctgagtgcctgacaagcattctcatgtagacccagcaataactcattattttacagatagagaaaatgatgatcatgatgcttgggttacttcttaggttcactcagctcacatctggcagagggtggtcaacttttccaagttttaacttatttatttatttattttgagacagagtctcattctgttgcccacgctggagtacggtgacacaatctcagcttattgcaacctccgcctcccaggttcaagcgattcttgtgcctcagcctcccgtgtagctgggattacaggtgcctgccaccacgcccagctaattttgtttttgtatttttagtagaggctgggtttcaccatgttggccaggcctgtcttgaactcctgacctcaagtgatctgccagcctcggcctcccaaagtgttgtgattacagatgtgagccaccacgcctggctcaacttttaactttagaactgatataaacatgcctatttttttgggactgactgtagcatacccattcaaagtccaggctttggaatcagacagacgtgggctgaactcagggtttcaccccttgcttgttgtgtgaatgagacatttcactgctttcagcctcaattccctcatctgtaaagtggaaggtgtaaggtcgcctatctgataggtttgccatggggatatgaagcacacttagtgttggtgccatgagtagaatgagtgttcatttcatatttgttaatgttatttaggtccgaggatgggtatggggtgctttggactctctttttctccctgcttccgccttataaagacatcttgctggtttctgcccattgagagaatccagctccacgtggggggcctgacagatgtcctaatatctccatccaattttttactctgaatggagtctgtgatgtatcacttcaacctgcactttctataaaatgctctccaggcttctggtaggatccagtgccagtgggaagtgtgcatgttcccagcctagatgtcacatgctcccacccaccctggaagcacttgggtatcccctggatgggtaagtctgtgtgtcattgtgccattcctgtctcagaaccaatgctgggcatctctacttgcaggtgctggaaagctttttcatgccagcatacatgcagcacacttctcattttggattcctttatcccacggtgacctttaaactggctgcctgggggcacagaagtactagcacaccattcacttatttattcattcattcattcattcattcattcactcaacaaatatattgttctagtccttaaggcacaactctgagcaagacaggtaaggtctttactctcaagaagctagcatttggtggggagaaacaaaggagaaataactactgtgcacatgtgaggcaattgcagatggtggtctgcagaattgggattgagactgcctgggggtggccactttagactgggtccgcaaggaaaggttctctgagctgagcatgagtatttgttcaagaaggctgagttgcatcccaaggtgacacagcttttaagcccacactgagcagctctgaggtcctaggggctgttcgagaacctgggatatagcactgactatgagacaaaaatccctgtcttcatggagcttacatgatgggggcagattcacattcattcatttgttcattaattcattaattcattcagctatttgagagcctactatgtgccaagcactttctaggcactggagaagtaacagtgaatgcaaaggagcaagcatccctgcccacacagagtgcattcttccagaatatcaataaggagtcggttagcaaaaataagtgggaagagtattccagagagaggaaaaaagggcaaaggccctgaggctgccactaacctatgggtgctcaatgaacagaaggcatgtttgggtagggggtacttaaggatacacaaggaacatggtctgagctgaggtcatcagggcctttaggtatggactttgctctaaattgcactgagtaggaagcttttgcaggattttgaatagggtcatggaatatctgggtcttatttcacaaagtgtgcctctgaccattgtgtggagggtggatagtgagggacaagagttggatccagggaggtaagtgtggttattgcagtcatccaggtgagaggcaatgaaattaacctgcaaagtgaggcactggcttagaggtgggaactgaattaaaaatcatgggactagctattcttttattaatagcatgatttttgataaatgattctggagctacatattaatcatttcaaagcaagtgctctaatttaactagagaccactgctggttgtgtgtgtgagtgcatatgtgtgtatgtatatgagtatgtgtggtgtgtgtcagtatgtatatgtgtgtatggtatatatataaatatatatattgtgtgtggtgggggagggggggtgccccaaagctagacagactctgactgtctttaggggaatagtgtttttgatatttccaggtgttcctgatgggcaccattgttattttattttatttttattttatttttgagacggagtctcactctgtcgccaggctggagtgcagtggcgctatctcggctcaagacaacctccgcctcccaggttcaagcaattctcctgcctcagcctcccgagtagctaggactacaggtgcgtgccaccacacccggccaccattgtgtattttaaagtgtgcttataaaattagttcagaggccagatgtggtggcccacgcctgtaatccaagcactttgggaggccgaggcgggtggatcatgaggtcaggagaccgagaccatccttgccaacggggtggtgaaaccccatctctactaaaaatacaaaaaaattagctgggtacagtggcgcgtgcctgtagtcccaactactccggaggacaaggcaggagaattgcttgaacctgggaggtagaggttgcagtgagccgagatcgcaccactgcactccagcctggtgacagaacaagactccatctctaaataaataaataaaacaagttcacaaatttcggaatgctcaatcttaaaagccagtatatttttggaaacggaatgctgatgagttttttattttttgcagcatattacatcttgcagttgcatgtatttttagtgctgttggccagcactaaaggtggggccctcagctgagctaattttgagtcccctcattttggcttcaagtatactcattcttggttttcccaagaatatctgggatttgtgatctgtgttatctgtggtttggtgtcgtattttgcaggcatagggtcctattcctaagggaataaatggatggcttgatgcttaagcacgaacttaatcatcgcagtagtgattaaagagtattcaacatgtacacttgcttgtaggaaggagtacacattgtattctcttttgatatgcaatattttattcatagccctattaagtaattttttttaacaaagttatatggattatttacaggtacatcacgggaaaactgcattttataattttcactgaaatgttgaggttacatgtaaagcaatttttatgtcatatctgatacattttaagaaaacatgtcttcctgttacagcggtaatgaccatgcctgctctttcttctgtgtcatatgccattatccctattaatactctttgggcttctataattataaagcagatgtgtatatcagggagagatgttgatttcagagtaagtttttctagaaaatagaagctggaaaaaaaaggaaaacccaaacttggcttcgtgctcgaagagacagcactgctgtgtgtgggcgggtggctgcgtgcacccgctgctcagaagtgccttttctctccatggggataactggctgtgtatccgagatgtggccaggagtaggcaagcaacgtgtgggcaggctgcatgttcttttattagcatcttcattgtactgcatctcgtcgagcccagagcatgaactggcctgggtttctaatatctaccctgcttcccacctaattactcccctgaaccctaaagtgagggagggagagttgctcttgtggggtgagctttccctggggtggctgtgaaccaacctggcatgtggatgttcttgggtatccagagctgtcctggactcaggcttggagtcagcttcttagcactgaatgcagccagtcatggatggaggtcactgtatctcacatgttccgctctccctttcctccatgaccttgcccctctgagcctctgtagcacttttcttgagtgtgtccaaggccatctagctaagaagtagcagaaatgggatttgaagccatgactgtttggtgatagagcctcagctttgaactggggttctactgcctggcacccctgcacaaatcatggtaacgtggtaggagaacatagaggtatagggcaagcccctccttaatgccatgaataatacccatcttataggattgtggggaggactcagtgaagtaacccatgaagcactaaacacgtgcctgacacgtgctcaataaatgagcacttgtcctgatgacaaaggtcgtggcattaattctctctcctagattgttacttccttgaggacaggaattgtggcttccttaatggccactgcagcagagtttctcaagttggcactattgacattttgggctggataattcttgttgtgggagctgtcctgtggattgtaggatgttgagcagcatctttggcctctacccgctacatattaatagcacccctagtcatgaaaataaaatgtctagacattgccaaactgcccctgttgagaaccactggtctgcaggtatctctcatggggatcacagggcttttatattctcttctctgtctctctctctccctctctgggtgtctctctctctcacacacacgcttagagaaggtggttaaaaaaaattttgttgaagtttgagaattttgagaacaaaggaaaaattttggaaggcattttaatgaacagatagactctgtcccattccatggtcaacagaatttcataattagatagtttgtttactgcaactctgcaccccattgcccatcattttagagttccaaccagttagaggatttttcttgcaaactttccttaaagcagtgatagtatcagctctttaaataatactatgcttgatgaagtggtacttttcgggataatttgagaccagccgacttgctgcttgaagaggacagggctatatttggtaataatatatatgtgataatatgtatgtaatattattataatgtaatatacaataatatttggtgtaactggtgactctgaggccagtctttgatcgaacctctcaagctatgatttacattatggtcaatgttagcataatgcaattatcagcaatcacttgctgttgctttgaaagtcagaaggatggctaataaaaatcttagaaaaagaaaacaggctgggcgcagtggctcacccctgtaatcccagcactttgggaggctgaggcgggcagatcatgaggtcaggagatcgagaccatcctggccaacatggtgaaaccccatctgtactagaatacaaaaaaaaaaaaaaaatttgctgggcgtggtggcgtgcgcctgtagtcccagctactcgggagctgagtcaggggaatcgcttgaacccgggaggtggaggttgcagtgagccgagattgtgccactgcactccagcctggtgacggagtgagactccgtctcaaacaaaacaaaacaaaacaaaaaacaaaaaaagaaaatcttagaaaaagaaaataaattgtaatatttcagaatatttgttggggaggatatgtgtgctcaagaaatatatactgagaacttaccattgatgctagagattgaattgccccatgtctacatgaaaaatgaatagaatataaacattttaaattgagccatgtctatctgtattatatttcttttatagaaattcatggaaatggtatattttaactgaattattaacactggggacaataggctttaatcattatctaatacctgtacgttgttttgaaattcatagcccaccaccattaatttcaaaattgggttcttactcaaagagtgatgaaaaggcaccagtaccaaatggtctggccaaaatgctacatggaactaaatgctggggatggtcatacaatgagttttaagtggctagaccctaaatcagaagcactttcttctaattagcaccatggttcttaatcctttctgtacattacaatcactcagcagcttaatacaaatgttgcttcccggggccacactccacatctttctgactctctgatttaattggtccgaatggggcctatacatcaggtgttttttaaaaggtctccaagtgattctaatgtgtacctgcattgaggaccagggaaggtgtaggaagcctgataacctttactctccagcctcatcctccaatcccatgattgtttatgggattgttgctacacacccagcttagtcatagcattcttactctagcttttttttagatgcaatttttatttattcttaaagaaaaagatttctttagcacctttattctaaagagctcttaattgctgtgcttagaacttctaaacagtgagcatttgtcaaacatagaatagcagaatgaaggggttggacctcgggtgaggagggctgtcgcatggtctctttcgagtgccggcgggtgggggctgcacatctcctcgcttctgggcccattgataagtgacctaaaagtgcctttcgttttttttggtggggggtgaaaaagcaatctgttttgtacccacagcggtgcactttaaacaggaagccctactggggccagccttctatgtgtcattaagtttttcacgccacatcctacctatcatcatgcacccatgtcatcgttcttttaaagggtgccagttttttgcttaagcacaaggagctgtgacctgtgttgtcatccctgatgcatgtcatgcatgtgacttcatgacatgtgggtgacttttgatctctgaaggaccagggacccagtctgtggatcaccactctctccgtgggtggtttgggtcttgttctctagcccacccagccaggtgcaattaggaataaaggaaatagcaaaggaattttgctcaaggccatgccaagcatttcatctcatatgaaaaggaaaagagagagagtgtgtgtgtgttggctagatttaggtagaaaacaggctggtgagaagcgtagaacttggttaaaatttctagccaaaagtaagatttttaaaaagatttatttctggatccaatccctgttgcccatttctatgaataatcaccatttgttttaatgtgaataatagcacacagcaaattcagccccctgagttttaccattttaagcaattgctttaggcccgtgaggcatgtactatttatgaagttgcatgggtagtaatggaaaacacaacaatgacagtagtaacaggtgacatttgtcgaacacttgcagtgtgccaggcactgtgctgacagcattacatgcattatttcatttaatccttccaagaactctttgaagtaggttggtaattatggccattttacaattgaggaaactgaggttcggagatgtcaaataactagtcagtggtggggtcagatttttcttttttttttaaatttatttgctttttttttttttttttttgagacggagtctcactctgttgcccaggctggagtgctgtggtgccatcttggctcactgcaagctccgcctcccgggttcatgccattctcctgcctcagcctccggagtagctgggactacaggcgcccaccaccaggcctggctaattttttgtatttttagtagagacgaggtttcaccgtgttagccaggatggtctggatctcctgacctcgtgatccgcttgcctcggccccccaaagtgctgagattacaggcatcagccaccgcgcccggcctatttgtttttttttttaagagacaaggtcttgctgtgttacccagactggagtgcagtggtacaatcgtagctcactgtagccttgaactcctgggctcgagcgatcctcccaccccagcctcccacgtagctgggactagaggcatgagccactatgcccgactcatttttaaacattttttatagagacggctgggtgtggtacctgtaatcccagcactttgggagactgaggcgggcggattgcttgagcccaggaatttgagaccagcctgggcaacatggagaaaccccgtgtctacaaaaaatacaaaaatcagctgggtgtggtggtgcgtgcctgtagttccagttactggggaggctgaggtaagagaatcacttgagtctgggaagtcgaggctgcagtgacctgggaccaccgcactccagcctgggcatcggagtgagactgtctttcaaaaaataatttatttatttattttaaaaatagagacagggtattgctgtgttgcccaggcccgtcttgaacttctggcctcaagtgatccttctgcctcggcctcccaaagtgttgagattataggcatgtgccactgtgcccagcctgagattttgaacagaggagcatgatgctgggcgttgactcatttggctgtgagtgtggaaagctgtcactggagtacagcaagtcagcactatcaagccagcccttgtcattgccaggagctgcggggagagaggtgttttgcattgctgcagggaactgacctcttttagtcagggaagtagtttgggcagtagaaagcagaacttgcacctgctggtaagatctgagtggtcactgacaaccagctctgcaaccctgttaccagggcaacaaagatgggcccaggggtagtggtgggctctgccacatctctctgtgcataagaacctttggccacttgctctggccttgtctttcaccaatcccagtgttcatatccagtgtaccaaccactgagggcagctgtcctggaatctgtctctcatctctgcccataattaactgcttctgggcacagtgcatgagttacatagatgagtgtgggtaagtttgccctttctgtggggggagcatccttttggtccactctcaggagggcatcctatgttatttttgtgatattttcctaagagttgtataagcaagtgcatcaagccaacttgtctaccccagctccctcttgagaccagcagaaactatttatcaactggcagtttacgtaacctctctgggcctcaatttcctcatataaaatgaggataataaatcgtatctgctcatagagttgctgtggggagtaaagagttcaaatgtatctgtcagtgaaggaaaaaagaaaaaaaaacaaaaacaaagagttcaaatatatctagcgttcaaacagaaccaggtatgcagccagtgcccaataggtgtatgagtttcctatggccaatgtaacaaatgaccacaaacttagtggcttaaaacaacacacatttattattttacagttctggaggtcagaagtctaagatgatgccaggcttggtggctcaagcctgtaatcccagcactttgggaggctgaggtggcaggatcacttgaggtcaggagttccagactagcctagccaacatggtgaaaccccatctctactaaaaatacaaaaattagtcaggcacggtcacgagcacctgtaatcccaactactcaggaggctgaggcaggagaattgcttgaacccaggaggtggaggttgcagtgagccgaggttgcagtgagccgaggttgcaccactgcactccagcctgggcaacagaacgcgaccctgtttccaagaaaaaaaaaaagtccgggatgagttttactgggctgagatcagtgtagacaaggctgccctctctctggaggctctagggcagaatctgtttccttgtcttttccagcttctagaggttgcctgcattccttggcttgtggccccttcctccgtgttcaaagccattggtgtaacatcttcaggtctctgtgactccgatccttgcttccatcttataaggatccttgtgatttcattgtacccatccagatatcccaggagaatctttccatcccaagatccataacttaaatcccatctgcaaagtcccttttgccatgtgtggtaatatattcacagcttgcagagatcaggacatgggcatctttgggaaacgggaagggggcattatttgacctaacatcaagagcatgagatgtttttgtaaaatgaaacaaatgttgcagcttcctaatgcagcttcttaggcccacctgcaggcccccttgacgttggtttttctctacctaggtctgttgtgtcgggtctggactcccctgccaagactagctccatggaaaagaaacttctcatcaaaagcaaagagctacaagactctcaggacaagtgtcacaaggtatttatttccgcagccggcctccttccttgctccaggatcctcccgtccgtatatgccaagggatccgcccggggccgctgctggctctgagccgcctgatccgtagagagtgaggcgctcctgccttcgctgaagtcgcgcctccagcagctcagagggagatgaattcgggccttgctgttgctgtaaatcctttaaatctaaaccagaggaggccctggatttaaacagtccgtttctcagcatgacccagccagatgtctgcttcttccggcaggtggcctgggtcctcacctgtggctgagatacatcccatctgctttgagtgatgcgaagtctctcttcctagtcttttaaaactcctgcttatgtcactgcggccactgtgttgattacgctcaacgtctcttaacattcactgttcctgcccagaggcaacgctctggaaactaataagtcactgcttgcctgggactcctaagagtgcagacgaataaatatctccttgccctgtcctggatttgtcctctagatctttgcaaggagatggggggggatcaagatggatttgggataaaattaaagtgacgtctgcaaaaacaaaacaaaaacaaaagcaaacaggtgaaaaatgatgattgtggcttccttgctaactgggttagagaagtgatcaagtgtgaaccgggacttgaatgagaggagtgacttagcatttggtgactgtccttaacgaagaactgtgcgctcctgggcgaagaaacaatggtatttccatcccaacttaacttttggcgaattagccttagcccagaccaccaggtggtttcggaggctacttgagatgtgattgctcctaatgaacctccacgggcctttttaacctgtcgatgtgtttatttcagatggagcaggaaatgacccggttacatcggagagtgtcagaggtggaggctgtgcttagtcagaaggaggtggagctgaaggcctctgagactcagagatccctcctggagcaggaccttgctacctacatcacagaatgcagtgtgagccttccctgaagcccccttcccttggaggtggcacttcctgttgtgtgtgtctcatcctgtttcatgatggctccatgaggcacatcacagccaatggcagagagtagagagagggagagcacaaaagcaagatctgtgttttgcagagtagtgagagccaggcgtaaggtccccaagaaatgagattggactcatttccagcagaaagtgcaggtagacggctggtaccatggagtctggagatgggagtaatccatctttgccgcaagttgcaaaagatcttaacatctcccatcccagcctctgtggtctgcgttgtgtctgacatgagcagccttgagaaccagactcccaactatgtacaagaaaacttactttcaatcttcctgacatcaaattttccattggccagaaccagtgtagtgacaagaaaatagccttgaaaacccagaccctctgtcattatttaccatgtgactttcattttttctttccttcacaagagtagactgtcttcttctccattgtcttgttaaatttttcattcaggtgttttttaatgtgcccaattaaacagtctcaagaagttgaatcacacatttctaaagtttttttcacaagggagaggaaatctatagaacgtggctgattaagaataactgctatgtttccattccagacttggctgcctttcagtggtgggtgaagttattcagctatgtatttcagatatagatttcagtgccattgaagcattaagggattcttatggatgaaaggtgtccaggaaaaataagccaggaggtagaaatagaccacttggagtcttaaatgacaactgggcagaggatatgaagtcattgctactttgaaagaggcatatgtactttagggcccacaaataactgtagaaaacactttgtagctatccacatggtggctgtaatagctactgggtcttaataggttttagtcctgaacatgcaagtaagtatctcctaggacaggtagatggtggcaggagacaggctgatgcagtttccggctggatccctaaggtcaccaggttgagatgatgtttcttgaaccaaggggttttacaggatggaaaccggaatcggcaaccaactggaagttgtgaactgtggtccgtcactcgaaactgtcctggtgtctgcgaagcagcttgcagctctcttaatgagtcttttcaaacaaagcaggatccacagggcatccctattaaaatttttgctttctgcagagcttaaagcgaagtttggagcaagcacggatggaggtgtcccaggaggatgacaaagcactgcagcttctccatgatatcagagagcagagccggaagctccaagaaatcaaagagcaggtaggcctgcttgcctgggagcacagcagcatctcggcttgcttggacctctaatttcaggagaggcgtgtttgagagagaaataggaagaaagggagagagagaaagggtgggggcagagtggaagagagacaggtatgtaggtcattcagaaacttcagatttctcataatttatatacatcatagaatgcttgttccagctccttttgaagctgataccccataatgtctgcttttaaaaataaagatgtaggtttagagcaagagtgggcaaacttcagcctgtggggcaaagctggtccaacacctattttctatggcccacaagctaagaatggggttacgtttttaaacagttggaaaaaaaatcaaaagtaaaacaatatttcatgacatttgaaatttatatgaaattcaaatttcagtctccataaataaagtgttttttttttggaacacagccatgcttggtaatttgcatatcggccctggctgctttcaggctacagagtcagaggtgagtggttgttacagagaccatgtggcctgcaaagctgaaactacttactatctggcttcttacagcaaaagtttgccaatccctgctttagatggttaaaaacaattaaatgttttaatagcttctcagatgcacttttaagtttttgagtgaagccaggctaattcatagttttacttacataaagaaatattctagaagagaaatttgaaccattctggtcaaggtcaagtcaggattaacactgcctatctgagtgcagaaggctgtcccctgtgttttcagaaaggagaatcgagacctttaaaaagcccactcttttttttttctttctaaacgggttttctttctaaatggctcatttttgtattgcctcattgtttcctttttagcatggatttttgtgtcttttgaaaaactgtaaatagagactttaatgaagagatggcaatgagcaattggagagctgaactatcagctgccaggcaactctcattcacttcagaaaatctaatggaaacactgatagaaatgaacatttctgtctctgggtagcacaaacttagccatctggctggagctaatgcaagaaacttctgcaaataactctatccattaattactctttaaaaaaagaattactgtctttggagttttgttggcatatttatcatctgaatattttaaagttgtgatcagttaatattctgttgcttgataaaaacattataaataaatgtgcataggacggaaaccctgtaaaggatcatcagatctctgaataatgcagtcttagaggttttgaaggctgcacattggctttgagaaatctgctttgacagttgactcatgctccttttatcaacatagtttttcatcctaaaagtttcaagaggtaggaatcattttctcccattagttcaacatacctggaaatttacttttggtgacatcctggggaaatgaaagctgtgtttggccaccagagggagcagctggtgtccatagattccttagaaacggaattatcaggacgttttgaaaaggtgtatgttggtggccgagttcaaagacacgtcttttatgattcataccacagttggcatgcatgtggagtcttagatttaatgactgctaaaagttccattgtggggaagaaacgtggtttcagatttgatttttcatcggaacaaggatttattttatgacttttggtaagttttgtgagagcaggatgtttgcagactgggagaaagcttttaatgcttgcagcaaactttcagtatttagtttgtggcatattgattttttctagacttgggatttattccctgatctttctcttaaaaatctaactttctatatcgctctttatttttttgagatggagtctcgctctgtcacccaggctggagtgcagtggtgcagtttcggctcactgcagcctccacctcctgggttcaagtgattctcctgcctcagcctcctgagtagctgggactacaggtgcacgccgccacacccagctaatttttgtgtttttagtagagatggggtttcaccatgtttgtcaggctggtctcgaactcctgacctcctgatctgcccgccttggcctcccaaagtgctgagattacaggcatgagccactgcacctggccggctcttcatttttttaaaaaatattttacttccacctagctaccccctctagaatatttagatttggtttaaaagaaaaacacctcaaagactcatgtgaaatttgattcctagatcattactagcaatttcagcttcttccttgctcccctactcaggaaaggagacaaaagtgtgggtaacacaaaagtcacttgtgttccatggtttctgagtgaattgcatcatacctgatccttcctccccacaaaattctgaagctccattcagaagacttgcgttaggtgggccttgaaacctgtctgcagttccccatcctgacctgactcacacctaccagtctttcattccatcctgagataccacagctctctctcagctgatcttgcaaacagacctgatgatcacctctcaggtttttcctgaagcagggatttggttagctgctagatttataggatttccttgaagtatcctgcacaatatcaaaggatccacaaatgagttagaattttcttttgatgcttgtaggagactgggtgccccgagagcttggagagctgacagagtggttgcctgattcctgccttcctccctcttatgtgctgacagctcagggaagagagatgttggggggaaggaacagacactctgtccttgctcttgacaaaacacaaaaattacattcccttctcgccgacataaattcaagaaagaaaagtgagcttgaggacaaaagatgctcaagatttggtgtccatgcctgtagccaggactggctttcccattagctctagcaggcacggtatctagggaccactttacttttagggtctcacaaaatgttttaattttttcatcagaagaaaaaagttgggcttaggtcaaagacactgttttcatagatgatgttaatatttttgtatttataggagcacaactgtaaaatgtaatttttaattttaatttttatggaggaaggcaagacaggctcagtgctcacagttatgaaagccataatatggctctgcttgagggggtccagaaaaaccgatattccatttcacatacagctcatgttctggcctgtgaattaattaattaattaattaatttgagatagagtcttgctctgtcacccaggctggagggcagtggtgtaatctcagctcactgcaacctctgcctcccaggttcaagcagttctcctgtctcagccttccaagtagctgggattacaggtgctcaccaccatgtctggctaatttttgtatattttgtagagatggggtttcactatgttggccaggctggtcttgaactcctaacctcaagtgatccgccacctcgggctcccaaagtgctgggattacaggcgtgaaccaccatgcccggcctgccctgtgagtttagataattgtgagcaggttataaagatctttggttatataatccagcattgcctgcttagtatgcatgacccaggaaacctgtgtgccccatgattctgaggattgaccttcaataacagtatgcttttgggtgggagagagtgaaatgagacccgtgttccattttgggctgttttttcctttctcctttacagataatagagggagaggtgtgcttgcatggaaaccatccaattttcataagagcagcacatcccctttaatatgctctggggggggggcgtcacctgctacaatgggataaaaggtttcctttataccctgttattcaaaaattgcaatttatcagttaaaagaatatccttgctcagtcgattatttcttgggagaaatattcaaatattcctcaccaattatttcttgggagagtggatctcagagatgttactgaatattgtgatttttaaagacattcttgattcaattccttgttcatttcgttttgtatctctctcgtcctcaccccacaagtcaccttggattacataaatgctcattcataatccttatacttagccttgatttttgctaacacagaatatttttatactttgtccaaaagttttcaaaatcactggccatttcttttggtgagcccagttctgagaaacttcaatgtaaatgttttgattttagaaatgcattttggaaaaggttgggctgtttggatcacttaaagggtttgctcaagggaacaggaaggttctttccttggaatttttctcacaagttattttgaccgaagccagtgttttgtgactcttccagatttcagggtgacttgcattgcaggagtgatgttatggtcatcattcagttttgagcccagaaaaattaatggtgagaaactgacatgatgagtttcaccttccagaattctttccactgagattttcaattaccctcttgtgctgtctgaaaggttaattttaaaactagtaccatatccaatttgtgttaggagcacatgacttctaaaggacaagtctatataaatgattacccttggcggaaaactacatgtaagcagtttatccttgttgtttaaagaacatcccttttggctctcctgtgttaggccttaaggttctgtgcatttcgtatggtgtgatttgcatgtgtgttcccggtggttttgctaatgacatatgctctacattaaaagtgtttttttttgtttttttttgtttttttgagacggagtcttgctctgtcacccaggctggagtgcagtggcgcgatctcggctcactgcaacctccgcctcccgggtccaagcgattcttctgcctcagcctcctgactagctgggattacaggcgtccaccaccacgcctggctaatttttgtgtttttagtagagacgggatttcaccatgttggccatgctggtctcgaattcctgaccttgtgatccgcctgcctcagcctcccaaagttctgggattacaggcatgagccacaacacccggccaaaacagttttaaggtttaatatttttttctccctcatcttcaccctacacttctcacctttgcctacttggtgcctcattctgggtccatctttctactcccctcgtctctaggtctgtaggtcgtttttttttgagacggagtcttgccctgtcacccaggctggagtgcagtggcgcgatctcggctcactgcaacctctgcctcctgggttcaagcgattctcctgcctcagcctcccaagtagctgggactataggcccgcaccaccacacccagctaatttttgtatttttagcagagacagtgtttcaccatgttggccaggatggtcttgaactcctgacgtcaggtgatccacctgccttggcctcccaaagtgctgggattacaggcgtgagccactgcacctggccaggtcttttctttgccagtctctcttcactgtgcatcttccctgtgtggttaatactcttccatcctcactgcctgtctattcttttcggagttcgaaagttctcttttatttcattgcctgctctttaggagtaccaggctcaagtggaagaaatgaggttgatgatgaatcagttggaagaggatcttgtctcagcaagaagacggagtgatctctacgaatctgagctgagagagtctcggcttgctgctgaagaattcaagcggaaagcgacagaatgtcagcataaactgttgaaggtagtcagccaccctccaggagggtgctttttgggtaaaattgtacatgatcttagcaagaaaaaggagaacctagtttaatgagaaacaacctagtttgagaaatagtaggataccttggaaaactcttggtctttatttacagaagataacattattcttatttactattattatcttggtcacagagaccaagaaagtagtctacacgacttttttaggttgttgagatttcccaatatgttgtgtctttttaattacaggctaaggatcaagggaagcctgaagtgggagaatatgcgaaactggagaaggtatactttccatgattggttttgctattaatattttgggtagataacttttttcatgttattatcagtggcccatcattgatgaagagtattcttcatcaatgaatagagacctctcttcgaggcttattttgatagtccacctttgggtgaccacatatgactttatggctctaaaagaggtaaaagacagctcatttttgtcacacctgcccacagcaacaaacccagacacttagtaaaaagtataggaaaattgttattgttttaaaggactgagcgactttctctttttgccatttgtatgttgctggtcctacatgcatcatcaacatggagctttgcactgggacaaagtcttccctgagaggccactgttcttcctctcccttaataggttctggaaacccaaagaaaaagaccccatagaaacctcaagagaataggactgcaataaatgtagcaagatgttaatgctgatttgccttttgctttatttcctgggattttaattatagatcaatgctgagcagcagctcaaaattcaggagctccaagagaaactggagaaggtaagcccaaggtgatttttcaggaacttaccccccaccacctcctttccaaacatctttgccttgtcccagagcacgaaagatgaaagaaacagaattagtcacccagcgctgaggaaaatgaagggggagtgagcgattacctgaaaatatcagagttctgaatatagtttttccttttgagacatgtcagcagtgtttatttttaaaaaccaagctgtgtgagactctcaagtaaaagttctaattatactacgacagaacccaagaggcctgcatctctcgcctcagggggcctggcacctcatttatgcacatttgtaagagaagtagttccccacccaaactgctttctgccagcaggaggcctgccctgcagaaggctggaggagccatggggttgtcacgtgattgggaaggggcgtggatttggtttatagcatcctgcaaagtttgtgctaatggcccttttatttcattgtttaattatttaattaaaaaaaaattttttttgagatggagtcttgctctgttgtccaggctggagtgcagtggtgtgatcttggctcactgcaacctccgcctcctgggttgaagcgattctcctgcctcagccccctgaatagctgggattacaggcatgtgccaccacgcctggctaatttttgtatttttaatagacacggggtttcaccatgttggtcaggctggtctcgaactcctgacctcaggtgatctgcatgcctaggcctcccaaagtgctgggattacaggcatgagccactgcgcctggccaacttatttaacttttttgagacagggtctcactctgtcacccaggctggagtgcagggcatgatcatggctcactgcagccttgacttcacacgctcaggtgatcctcccacctccgcctcctgggtagctgggactacaggtgtgcaccactacacccagctgattttctgtattttctgtagagataggattttgccatgttgcccaggctggtctcaaacacctggactcaagtgaaccacctgccattgcttcccaagatgctgggattacaggcatgagccactgtacctgaccattttatcttgtttttaaaatttttattaattttttccctagcttcattaaggtataattggcaaataataattgcatgtacttatagtatgcaatgtgatgtatacacacacacacacacacacacacacatatacattgtgaaatgattaagtcaagccagctaacagatctatcacctcacattcttcttatattttttgtggtgagaacatttaagagcaattttcaagccctttctttagttgaacactggaaatgcttaatggaagggccagaatgaatgtggttgtgggacgtacctttggcattgagaatgtttgtgaatgtgtttgctggcttggtttaatagagttcctcctcctcctccttcttcttttttaaaattgtggtaaaaaaaaaaaccacataacattaaattaccatcttaaccatttttaagtgtacagttcagttgtgctaagtttattcccattactgggcaatgaatctctggaacgtttttgtcttgttacactgaaactctataaccaccaaatacgaattcctctcatccccctacctttctactttctgtttctatgattttgactactttatatacctcataaactggaatcatacagtgtttgtccttttgtgactggcttctttcatttagcgtaatgtcctaaagttgcattcatgttgcatgtatcagaatttccttccttcttaaggtggaatcatattcctttttatagacatactgcatattgcttatccactatttgctccctgcttccttattcttgagctctctaatgaaagctctcatggccctctttagccaaaagcttgtgagaggacacgtgtctccatctagaactctgctctccaatcaaagtgtgagggagccacaaatattacttacagatgtaatttaaaattttctagtagccacatttaaaaacagcaaacacaggccgggcatggtggctcacgcctgtaatcccagcactttgggaggctgaggcgaactcctgaggtcaggagttcgagaccagcctgaccaacatggtgaaaccctgtctttactaaaaatacaaaattagctggatgtggtggcgcatgcctgtaatcctagctactcgggaggctgaggcaggagaatcacttgaacctccggaggtggaggttgcagtgagccgagattgcgccattgcactccagcctgggcaagaagagcaaaactccgtctcaaaaaaaaagcaaaacaggtgaagtcatttgaatgatatgtttgttttaacccagtatatctcaatatttcccataggaaaattaacaaatgagataattaaaataaggagaaaattaatgcttagaggcaaatacattgatacctgggtagatcaatccatttagatctttctatttccattcattacgttgcatcgaatcgaagatgctaatgatggtcagatacaccattatcttatataccccaagaaagaaaaatgcatcaattttaattgtggggtggatttcaaattcagtgatgttaaaaaaagtgcaccttagaataatgaaatatagaattaaatgattgtgtatttgttttgacaaatggtaaattcagtattacctgctttttaaatttaggacactgtcactatctttttttttttttttttagattatactttaagttctgggatacatgtgcagaacatactgtcaccatctttttatatgaataaatttgcccacctatctccttttccttctctcttcctaggctgtaaaagccagcacggaggccaccgagctgctgcagaatatccgccaggcaaaggagcgagccgagagggagctggagaagctgcagaaccgagaggattcttctgaaggcatcagaaagaagctggtggaagctgaggtgagcagggaacctccagcccaggccccagcggcctcggcctttggctgtgcccaaggaaagaaactgccagaccatcacttgcttatgtttgaccaaagctgctttcccttctgaagatccctttgaaacctgagaggctgggaatcatttccccccaggggaaagaaagatttgtcatagcagcttcaagtagaaagatgtcttcatagaagttttttctttctgtttatttttctctgacctacccactaatctgggagaattttgatttttataggtaaaccgaagctccatcactgggtttttctttctcttccctctgttttttccttgcctttcccctccacgatattaatagcatattaattttcaaggcttcacctattacctgcgcgtcaatgactctcagatctatatttttgggcctcttgtctacttcaaattctttgttgttgttgttgttgaaatcatttgtataattttaccagaaccacatgagtgccttttcgtaaaaaacttaaaacagtacagaagaatataggataaaaagcgattcttctcctttactcgtatctgcctcctctgccccttggtgtttgtcccacagaaggatttcaccctcctcctattgctgggtcttttgctttttcctgtcacattcttggtgtgaacctcctggtacatgtctcttttgggccatcctcacccacattcatctgcatttcccccagctcccctaaattccaactgagtgcctgaatggtgcatcagatttagaatgagctcagtctcttccccggcaagctggtttcccttctcactttcctcatgccaggcagggccaccatcattcatctcgtcattccaggcttgaaaccttggtgtcatttcgttttctctggaccccgctattcagtgagtccctccatcctataaatgcagccatacgtctcctgttcatctcctgcttcccatttctgtagccctccttgtagtccaagccctttcctcttggctgagaaaatctaataatttcttggccatctgcctccagcttctccttccttccagctagttcacacagtgaaagattcatggacctcaaggaccagatttctcagaattccctgccccatcccaaacctttcaggggttccataatgctcaggtgcacccctgagcctggtacctgaaaccctcaacctttgacctttctgcttttcacctgcccttccccttaacatgtgctgtgctgtagccattccaggcttctcttggggcccagactggctcttgactactgctgtgtttctgctagtgtgtctccttttgtctgaaacatcttccccctcctctcctgtccttcctcctgcaaaacaccatataccacccccctccagagctcacgcctctctgatgtctctgctcaactgtccaattaaaagtcctctttcctgcctgcaacctcctgcagcactttgtacctctttgctttatggttcttcctcctcttaacctatattatgattatttgtgtttatcttatctcctccaagggcaggaatgatgccatcttcctctgtattttccgtgatgcctaggtggcactttgcagatagtaggtgcttggtaaatatttgaatgaatgaatgcactcttgtaacctacacaactgagtacctagattatagaatcttattttctctgctgttgcttcgggtgcctgagacttttcttcctgactcgagtgtatgcttcttgagggctctttccctcggtgcaggtgttatgcccatagcggttactccattaaaactctctgattgattcatgatctacaggaacgccgccattctctggagaacaaggtaaagagactagagaccatggagcgtagagaaaacagactgaaggatgacatccagacaaaatcccaacagatccagcagatggctgataaaattctggtgagcaggaatgaaagtcgcaaagttaaaagataacaggttagagtttgcaaagggaagggggtaagaagaagaattaaccgccacaataagggaggtatctccaagtagatgaattgagtgaggtggtttcagcatatgccacatcgtagagtagtatgaataaccaaataacggacatttcagcactggtaacagatccgtaaatatcgttttttgctctgtttgctacagcctggcttttttttttttttagtggaacgtgcatctatcattttcaatacatttttaaaggcgtgttgacatacttctatcagcagagctttggatagctgtcaacttcgcattgccaatttaaaaagctgtaggggtttagacctttaagaccgaaattcagattcttgcttttagagaagaaagcaattagtcatacagaattgttttgctaggagtagtatttgtcatagatccatgttcacccactcactttctctgctacagttggttattattattattattttttcaatttccttagatatagcaggtctttttttagggtctgtagtcatcctgattctgtctcaggctctgatcaccaaattaacttgatcaaggaaggttcgggtggtatttgcagatgtgttgacgttttgcccctgccagggtggaagacagcacctttgaagggctctccttggacctcagtcccacagccagaaatttgacatcatgtttgagactcaaggatgacttggagtccattcctatcccacctgggagagagtctctgaagtcattggtcattcctctccaccctaaggaggcaaggtcgtgagcagggcacttcatctctctctcttcacatcacttctgggaaatgagtcaccagcaactattggaattccatagtggccaacttataggtctatacttaataccaaatcaaactgtttacaactttacatttctgtttgtgtgtatttataaatatatggatgttctcgaatcaacaggtaaaagaaaaatgggttaaattgttttgctaagacacccagtctttgtatatatgtctgcacacaaagacaaatgtgactgttagtctaccctttctgttctcttgttccgtcatcaaagtttctcttggctattgtcaagtgtttgaattttatcatgagtataaaattagatcccactgagatcccaccgctgctgtcccttgcttggtataaacggagtggttaactctcttgtggttgcaaagtgtttctctgtttaatggtgatgtgttcattcattcattcaacaaatatttaatgagcttctactatgtgccaggcactgttctaggagctggaaatttagcagcaaacaacagtatttgcataacaggactgaagagttgatccaatatatctagaaaatacctgtttaaaaaatgacaacaacaacaaaaaatgccaaactaccaaggagtcagatttttagaatatctgctcttcctaaggttcacttacaattaaaatggaggagtagagagttctgcattcttggattatgtgttataaactcccattcacaaatagaccagaaatttggtcttaaagttgtcagtctcagatacctgagttttttgatctaattttagattctgatttccattcctgtgctatcttatgaagaccgaaactggaaaaaaaaaaaaaaggatgattatcaaatgatttctaacataaaggaaaaataagcggatttcttcgtccgagtgtatcttgccacccgccggagtacctttgtggttgtgacttcatttattagaaggtgccttttgctcaagaaccctgtgcttaggctgcaaagtatctaggaggtgggcaaagagtggtccttagtaccattatgtaatgatgatgcctgaacatacatcgccaaatgtcattggctttaaaatatttgctattctgataagaactttcaaaacagataatggtacagtcagtacagtagagtccttggccttagtaaaagaagttactgcaagagatcgtttagccaagtacatatagaaccttttaaaatatgtttttattaatcctgtttattttcaactcttcaagatcacatctattgaattgcagtagatcttgtgcacctggtcttaagattgaactttaattgccctcagagcaaagccaatgcttggagactttagaatatcaaaagcttaatcactaacattttaagtgtgtgtgaatctcaaagtactttttcacctccattttatgaacatatcctatataatttcctcattcttcaaaaccctcataattgcttccacttcaaagaaaaatttcataatagtataaagagttgaaaacttggagtaatgacttgatattagtaattaactgatgggtccagattcataagaattaatatagatgcagctgtgcatttacagaatgttttagtgaattgaatgctgccttttgtaaggtcagtttataaaacattggcaaatgaactgcaattttcaagtgaattacagttttgtttaaaagctagaaacttggtcaggcatggtggctcgtgcctgtaatcccagcactttgggaggctgaggcgggtggatcacctgaggtcaggagtttgaaaccagcctgaccgacatggtgaaacctcgcctctactaaaaatacaaaaattagccgggcatggtggcgcatgcctataatcccagctacttgggagactgagacatgagaattgcttgaacctgggaggtgaaagttgcagtgagccaagatcgcgccagtgcactctagcctgggcaacaagagtgaaaatccgtctaaaaaaaaaaaaaaaaagctggaaacttaacaataaaagaattaagagaacattaaatgtaggctatttatattactccagattctcttctaatctttaatatgtctgtacatttttatgtcattattatcagtgtattatatgtttgtctttgtccccatttgcattgtatcatatgaacattatatcacatgcacatctacagatagtcacatatgccacttaccagtcagttaaaatcatcattcaaaacttgaagtgcttggatcataacattagttttcctttttagctagggttcttgagcaataattctgttaatgaggaaaatacaaagtatttttaaaaatcataatcatatattaaaatgacttttctcatttaaggctcaagatagtggtcagggctttgtcatgtactaaactttccagtgttgccttgttactcttatttctctatgcaaagatgaagagctgcctttgttcgacctgtcatactgacgtatttgtggtctcaggccttacagcccaccagctatgtgtgtatgtgtgtgcgaatacttggacttggaaaacccagggccaaggcgtggtggtttccttcccaagagccttaggctagtaatggaggaccagatgcccgttacctgtggtacctgtaccaaagtcatgtttcctgtgaatgtctaacgtgcattggcggtgtcctgccctctgcacacctgactgtcttttcttttgtgtctaggagctcgaagagaaacatcgggaggcccaagtctcagcccagcacctagaagtgcacctgaaacagaaagagcagcactatgaggaaaagattaaagtaaagacattttctgatcttccctggccttgctcctatagtaccatgtagctcccatctcttcctgggcccttgtggccatttcttgctggaccaaagtactgtttggggtgaataatgtccttattccatggtgagagatttcagggtgttacttatgtgaaggattggaaatctgaagttccaaaaaaaaaacctttttttttttttaaatgtggtcatcatttatctcaatttcatctttaaactgattttttaaactcattgtcatttaatccatgatcatttctataatcctttttcttttttaatttttgtgggtacatagtaggtgtatatatttatggggtacatgagatgttttgatacagacatgcaatatgaaataagcacatcatagagaatggggtgtccatcccctcaaacatttatcctttgagttacaaataatctaattacattctttaagttattttaaaatacacaattaagttactattgactgtagtcatcctactgtactctcaaatactaggtcttgttcattctatttttttgcagccattaaccatccctaccttccctacaaccccttctacgcttcccaacctctgttaaccatccttctatactctatgtccatgagtttaattaagttgatttttagatcccacaaataagtgagaatatgtgatgtttgtccttctgtgcctggctgatttcagttaatatgatgatctccaattccatccatgttgttgcaaatgactggatcccattccattttatggttgaatagtactccattgttgtatctgtaccacattttctttctttttttttcccttcaacttttaagttctggggtacatgtgcaggatgtgcaggtttgttacataggtaaacgacgtgtgccatggtgattggctgcacagatcaaccaatcacctaggtcttaagcccagcatgcattagctattcttgctgtcttcctgatgctctccccaccccacccccgctgacagggtttgtgttgttccctgccatgtgtccgtataccacattttctttatccattcatccgctgatggacacttgggtcatttccaaatcttagctattgtaaatagtactgcagcaaacatgggagtgcagatatctctttgatgtactgatttccttttctttcctttccagcagtgggattgctggatcatgtgacagctcgatttttctttggctttttctttacaattttactttgcctttaatttttctgaggcttactgtattgtgtctaaatgtggatttcttggctaggtgtggtggctcatgcatataatcctagcactttgggaggccgagatgggtgaatcacttgagtctaggaattcaagactagcctaggcaacttgacgagacccctggctctacaaaaaatacaaaaattagctgggtgtggtggcacgcacctgttgtctcagctactcaggaggctgggatgggagaattgcttgaacctgggaggcggaggttgcagtgagccgagattgcaccacttcactccagcctgggtgacagagagagaccctgtctcaaaaaaaaaaaaaaaaaaagtctgtttctttttacttatcttattctgcttaagatttactgggctaaatatatatatatgttatataatatatattataatatatattatattatatataatatatatatatttagagacatggtcttgctcagcacagtaggctcaagtgatcttccctcctcagccacccaagtagctgggactataggcacatgacaccatacctggctatttaaaaaatgttttttgtagagatggggtctcccgggcttttgagtagattcatatctttttatttattctagaaagttagtggtcattatatctcaaatattgtctcttcccccttctctcttttccttttaagaatttgattggggctgggtgcggtggttcacgcctgtaatcccagcacttgggtggcagaggcgggtggatcacctgaggtcaggagttcaagaccagcctggccaacatggtgaaaccccgcctctactaaaaatacaaaaaaattagccaggcgtggtggcgtgcacctgtagtcccagctacttgggaggctgagacacgagaatctcttgaacccagtgagcagaggttgcagtgagccaagatttcaccactgcactccagcctaggtgacagagtgagactctgtctcaaaaaagaaaaaaataaaaaagaatttgattgggcatcagttagatcagctccaatttagcctttttaaatattttctatttctttgtttctttgtgctacattttgggtagtttcttctgacatatttcccaatttgcaaattctttcttagctgtgtctaatctgctgttccattgaggttttttcttttctttctttcttttttttttttttttgagacaggatctcactctgtcacccaggctggagtgcactggtgcaagtcatagctcattgcaacctgggcttaagcaatcctcctacctcagcctcctgagtagctgggactataggtgcatgccaccacgcctgggtaatttttaaattttctgttgagttttaatttcggttgttatattttttacttctagacattctatttgggtcattcccaagtttgctagattatttaagacaatcatcttctgttctgtgcattcattttcaagcctaacttttctttctttaaatgtactgagcatagttattttatcatctgtacctgacaactccactatgtgaagtatttgaaggtctgcttctgctctgttgtttctcttggttctttgtcatggtgactgttttattttccttggagaattattaatggaaattctttgaggccttggatgaaatgtgtgcccaccttggtgggtggtcgggggctttcatttctgccttttcttgaccactgaggctataaaaactgaaacttaagttaatttgtttcagtaaaatatctcaggttaaacccttcttacctctccctgcttctgttttacttagtttttggcaatttcttactctcttgccaacttgtaggtgcttttgggaaaatgttttttatattttatctagcattttaaatcattttcaagagaagggctggcctgacatgtagcccactatgctattagaaatggctgccgctctatcaatttcctttaaaatcacatcccattttcatgatgatttggatcaagcctttaattcattcttatgttcttgagaatcagatgctgtttattatatcttgaatattgtcgcttcccttttccaaccagacattgaagggggatttcaatttttgtgatgatcttgttattgatttggttggtattctcaaagaattgagtggtcctttcttggagaatctaacacgtacatgctcacacagcatcatcaccatcaccaccctggcatcttttaccgctggcgttatttttggttgtttttcagtaaaagaaatataggaggccaggcacagtggttcacatctgtaatttcagcactttgtggggctaaggtgggcagatcgcttgagtccagggattcgagaccagtctgtgtaacaaagtgagacgcccttctcatcttgtctacaaaaaatacaaaaattagccaggcaggtggcacacatctgtagtcccagctgcttgggagcctgaggtgggaggatcgcttgtgatcaggaggttgaggctgcagtgagccatggaaagacatatgggaaaacaacccagaaatgacctcaaagtgttctcctgtgacccctggtacttcaattgttagaaaattatgagaatgtacacagtagtcccctggcacctttgcatgatgaaagtaaccttttgtgaaacatattctatgatttggtgatatattgatgttcctaccaaaagccatattctatcttaaattgatttagatgtctttagtggaatctcttatttcaaataaacattttgctccccttcttccccatacatcttgtttatctttctgccagttgaaccctatgaaagctaagagagatccgtatgttcttttatttatctgtttattgttttgagacaggttcttgctccatcacccagggtagaatgtggtagtgtgatcatagctcaatgaggcttcgaactcctgggctcaagcaatcctcccatcttatcctcctgagtagctgggattacaggtgtacaacaccatgcccagctaattactattttttatactttttgtggaaatggggtcttgctatgttgcccaggctggtctcaaacttctgtccccaagcgatctccacccgtgtcagcctcccaaagtgctggggttagaggcatgagccaccatgcctggcctagtgcatacgttcttgatagaggcttatcccttctagctcatacttacctcttattggtatccttcttgaccaaagttgaggtcttattttgagcagaggcatcctgaaaatgtatttcattgctttagcacctcataaaatataaagggcatatgtggtctagatattatgtggtctctgctaacttctagatggaaagaaatttgttttatagatcccaaggaatgtcagggaaagatctgtctttcttccctactggaatctttatgaaaccatttctttttagcctgttctgctttgtgtttcctgttccagcctctgtcaggccattttagtaataattatgatcataccctcgattctaccctgttcttgctcataattttagaatcatgctcagacatccaagagagtgggccatttctcatccttttgagcttcttcttttctctcatgaccctgttcccaccttttggtcttctcttccaacttccattctattttttttcatcagtcagttctagtttaaagacctctttgaaatctgttctttcctttctttctcctgtggactccctccccgctgactggctctttttagggacgtcgtccccatgagctgtgacagtcctttcacaatagacattgttggaaaggcagattttagccctctctgtgaccccagctctttcagctttattcccaggatcctgttgtcctccttgatgttgttggtgttctttggaaaagtcgaatggagcctctgtggtgaggaacgtagggttgtggtcaaaggctcgggcatgttctgatgtcgtcttcttttttccttcctttttgcttgttgttttggcaactcgtagggctgtgtgtgccccaaagaacattagatcaagttggcgattggtgataccattactgttttatgtttcctcttgggaacagtaggtgcttacagtggcattctgagcactgagaacacatgatctctcttcccctgggaaaggtttcttttcccagtgacttttttttctccccctagttggatcagaggaaagaaccagggaaagaggcatttttttctttcttttatgttgtctttttaatctgttgaccatccacctacgttattggtggccaaaagcctcttgtccctggttgtttctgagcatcatccttggtcacatagacttcccctgtcttcggcttctctccctcttgcacacagcccaggagtatctagaattaatctgtataaattaggagtgaggaatattctgaaaactacgggtgcactggcgaagaaaaagttgtccccaggtaatatctgcagattataagaaatttattctctaggtctggatctagagcaatcttgtttcctcctcccttctcattctggagtctgcctcattttgaatatatctctctggtctttgggctgctgattttaaaataagttcttggttcaagtcaacctgttacttgccattggatggtaatatttgacttttcaatcttatcctgattgataagcggactcccagtttttgccttctctttgccccagaatttggagacctcgggcctctcccctgcttttctcctctttcctagattttctcaagtgtccccgtttagtcttccctcctcagcttggctcctgagaacatttgctgctgcttttgtttttgtaggtgttggacaatcagataaagaaagacctggctgacaaggagacactggagaacatgatgcagagacacgaggaggaggcccatgagaagggcaaaattctcagcgaacagaaggcggtaggtagaaggagttgccaagccagtgttcaaaggagggtttttgaaatatgccaagaatcacccctgataagactctatttcacctggtgaaattccttctgttgaatcctgtggagttgttggtaataggaggctttctctgaaactgtttcctttcctaaaagcaactgaggtggtggctctggatggccagttttgtgtttttcaagaactcatgctgttctgctgtctgctaaaatactgtccttctaaatgcccctgacaaaatgtccagtggctcttggtcttcctgctcttttttttttttttgaggtggggttttgctctgaagcccaggctgcaatgtggtggtgcaatcatggctcactgcagcctccaactcctgggctcaagtgatccttccacctcagcctcccaagtaactgagactacaggtgcatgcccccatgcttacctaatttttaagttttctgtagagacgagatcttgctatgttgcccaggctggtctcaaacttctggcctcaagcaatcctcccatcttggtctctcaaagtgctgggattacaggccaccactcctggccctacacttctcttctttttacttgcctgtttgtctcttttctaatccacataggcagttgtttcagaaacttgttgcccctaaggtttacctgtggtgcttatttatctgcactccaccaagacttaccatatcagaatctctctcttttttttttttttttttgagatggaatctcactctgtcacccaggctggagtttagtggcatgatttcagctcactgcaacctccgcctcccaggttcaagtaattttcctgcctcagcctcccgagtagctgggattaaaggcatgtgccaccgtgcccggctaatttttgtatttttagtagagacagggtttcactatgttggccaggccagtctcaaactcttgacctcaagtgatctgcccacctcggcctcccaaagtgctgggattacaggtacgagccaccgcacccgaccccacatcaggatctctgaggggagatcctgggaaattaaatttttagttagtacccccacaccccaattcttatgattttttaagttggggaaactttgctgtagagaagctgtccccaacctttttagcaccagggaccggttttgtggaagacaatttttccacaggggtggggggatggttttgagataaaaccgtaccacctcagactatcaggcattaaggcattagatttttttgttgttttgttttgtttttgagacggagtcttgctctgtcacacaggctggagtgcagtggcgcaatatcggctcactgcaacctctacctcccgagttcaagtgactctcctgcctcagcctcccgagtagctgggattatagtcatgtgccactgcacctggctaatttttgtatttttagtaaagacagcatttctccatgttggccaggctggtctggaattcctgacctcaggtgacccacctgccttggcctcccaaagtgttgggattacaggctaagccgccgcgcccggctggcggcattcgattctcattaggagcacgcaacctcgatccctcgcttgcgcaggtcatgattgggttcacactctgaggagaatctaatgccactgatcccacaggaggtagagctcaggcagtaatgctcgctcgctggccgctcacctcctgctgtgcggcctggttcataacaggtggcagaccggtaatggggtactgctctgtggccctggggttggagacccctgctgtggagtctagagcaatggtggctgggtgagaaggaatcactcagaaaatgacaaccctcgaggaggtggtgataaatgcgaatgtgcagatttgagttaagagacttgcaggcccaggtcacatgtagatgagatggggtttaacaaggcctgattactcccaggatgttaggttcttgaataggtccttatgtctgttttaaatgcaagccacttagccagtgtggggagatttcatcactgaaaaaacaaccaagtaccatccatttgagtggtaccatctgtgatcctcagagtacagactagttgagtgccttgttacctctagccaaattgccgtcatttcagatgaaacttttaccctggcccgcactgcccctgttactcctgttctggtgtgtgaagtttcataggtgccctgtgtttcagatgatcaatgctatggattccaagatcagatccctggaacagaggattgtggaactgtctgaagccaataaacttgcagcaaatagcagtctttttacccaaaggaacatgtaagtattcaaattctaactgccctacattattacactttggtctcctctcctgtggcataaactcccttcttctgtttgatggagctggagtggattgaatgacttctgtagctcagcccagccctcagatacttacgtcatcttgccctgtcttaagtggtctcactctgccacttttcagtcgggttttcttaaatgccttcaattaccatcacattacagagtgttttgctctctctaatgaggctatttataatttgcttgtggaaagctgcagttcttgttccctagacttgcatcctgtaattagtaagaggtgaaattgtgtgtgcccagttgggccatccatttagttgtcactaggttagaccctatggaaggaagtttggggttcagcaagggctgtgttccaggagcactttgagctgaatcttttcccccagagaattagaatctccaggatttttttcccccttaggtttctctcttcagagatctcccaaaacagtcccatcttaatctaaaccagcttagtaggctgtgttttgggtctttgagtcgttctaggttttgatacttctaagcagtttgctggagaggtgagggagatctgcagagaactagaaggaataccattctttctccttagtcctttttctccagggcctgccttcatgagttactggggtgcccttgtacagtaatctaaggaggcccccttctgtccctacacagactcacagaagaaataaacaggcctgtcaaaggagtgaaatgttagtatctcttgcatcctcctggaccttacttaatcccatatgtgagggactgacactgagtggtgatgagtaaatggtccccacgttcgtcatgccgggatcatgcttatgaggccagatcaggagacagctaacccaggaatggccctagtccacttagtgaggagacatgtctaactccgtgtccgtctacctcccgtggaaacgggctcaaccctaatgagactgtgattttgtttggatcctcccaccacccccaccaggaaggcccaagaagagatgatttctgaactcaggcaacagaaattttacctggagacacaggctgggaagttggaggcccagaaccgaaaactggaggagcagctggagaagatcagccaccaagaccacagtgacaagaatcggctgctggaactggagacaagattgcgggaggtgagagcgaggagtcatctcctgggaggatttgctgggcgattcgggctctgaacaagtcagctttcgagcacaaatcaatatctatacaagagacattgtgcttggtggttaagggggcagacttgaggcaggagaaaagggtctggaggcaaggaacctaaggccaattcatgctgaatcaaggaaaaacaccaaggtttatggcagggaatctgaggcccttgtgctaacctcttttttttttttttttaagagagtcttgctctgttgtccaggctggagtgcagtggtgcgatcttggttcactgcagcctccgcctcctgggttcaagtgattctcgtgcctcagcttctcgagtagctgggactacaggcgcctggcaccacacccagccaatttttgtagagacagggttttgccatgttgaccagactggtcttgaacttctgacctcaagtgatccacccgcctcagcttcccaaagtgctggggttacaggcgtgagccaccatgcctggccaatttgtgctagctttctaaaagagaaaacaccaggttctgtgggcagggaacctaaagcccattcctgctgacttcccagagctggatcgaaaggaaaacacgtggggctggaggcagggaacctgaggccaattaacacaaacttcctaaagctgaaccaaaaggaaaatcctcatcttcccacgccccagtagtgaaagatggaacaggctactctccctgcaatgctccaaaagatggaagactactctccctgcaaccccctccccccaccttccaccattgctcagatggaaaggaagagcaccttggatgggccgcgggccaaggagggactatcccttcatctgcatagggcaccagttcgcctcagcctgtaattagccacagaccgaatcctttattcagataaggagtaaccaataggaaccccaaaaggagtacttaaaacccagaaaactttgtaactgggcccttgagccacttgctggggccactcccaccctgtggagtgcgttcttgctttaatagatccctgctttcgctgcttcgttcctgtgtttcgttcctttgttactttgtgcgttttgtccaattctttgttcaaaatagacaacttagaccccaggccctccttctggtaacagactgggccatggggatctgggttagaattccacctccactccttactggttttatgacctcttactagttttgcaagctgcctcatctctctgctgggcttcagtttcttcatctgtaaaatgtcagtgataatgtatctcctttatagggtcctgtggggagcgtgtcaatttgtgcatctgtcaaatgggagcagagcaattcctcctttatcaagatgtaatgacagccccgtgacctagtcagagcttagccatggtggcccagtgctggtggcagaggtctgtctcataatgacggtgggagattaaaagacaaaaccaaatttaggtgtgattgatgaaaggtagctctcttcaaaaacataaggaggctgggaagagtggccaggttttggggaggaaaatacagcaaattgggttgtagacatgttgaggttgattgaagccataaggttacatttatgtagtcactgtatatttgtcagatgtctgctgtgtgccaatttgtagcctgggtctacagtggcgacaagacagacctgttcctgacacgagggcttttagcctagcagcagggttcgctggcaccagcagagacacaactggagttcaggatagtggttgttggaagctgaacacccaggctgggagggaagatacaatgtctcatgtaaaatagttgctcaaatatttgtgatggaattcttcaaaaagcagatgatctttcttaaggaaggtcctgttaagcagacagcggtctgaggtctaagccttgggtagtactcatgtttatgcatgtctttatttgtcttggagtattaaaatgaagtcagttctccaagggacagtaacaatgtgttatctcatgttttttaggggttgtcaaggtgtgaactcctccattaggttcacctggagtgtctggttttattttcattttttctagcaatggggtcttgctatgttgcccaggctggtcttgagctcctggctttatttatttatttatttttcttttattatttcttaggtcaggatttctcagaaggaggacgtctggctttaagcagtcctccctccgtggcctccaaagtgctaggattacaggcatgagccttaagccttaggcgatggtttaacttttatcatccaggctatactttcactcttctgtaagtttaacagcaagatcacgggagactcgcccttaagtttgagtctaaacaatccagatggacttctctagcttgggggccttgactggctgtctcttgccttccctttgcacaaatgttcctcttaggagcctgccctgctgctgtagctcatctgggctattaaagtgtcccagggaagctgttgtttttcacttgaatcagtagagccagcccctcaaggatggtaagagaaacttcaaacgtttcacgagaggttcaggctctatattctccctgggagttttgcagtttagctctaaatataaccagatcagtccctcttcttttggccacatgctgctactgagattgagggcagaggcctccacctggagtttgatccgccttaaaggacctgggccttcccccaactttgtgtgtgcagcgttagctcttctctagccaggtgtgtggagtcacaaagatgcaggctcccgggttcttccttcattgtatagcatccagctcccgctcctccccttgagtcactgtcacctgcctctcttggttttgccaaatggcatcggaagcattttcaggcttgctagtagaggtccactctgctgtgactgctggtgttttagtaagacagaagggtacagtgtttaccctgtacatggtcaagtgcaatggtcaggacacgtagggatgttgcaggaatacagcaacatgttacatggactcttgagccagactttctgggtttgaatgccagtcctgccttttaaaaagatttttatagctgtgtgacatttgctcagttacctaatctctcagtgccacagtttgcttatctgtaaaatggaggtaatagtagtacctcccttagtgagttgttctgaaaatgaaatgagttaattcagggcccagtgtgttgtgaggaccgtatttgctgctgtgacatcgttgtcatcaccatcatcactagagagagataatagccatggcttcagctgtcactgatttgttaaggcctcctggatccaggttgccaatccagacctttcttttgagtttctgacccattgtcttactagtagactacttattagtagacgttagacatctccacttggatgtctcccgcagggctcaagttcaacatgttaagactgaatttcttatcttttgcctcagattggccctttctctcctattctgtcatagcaatggtctatttgtgtaattcacccgtccagaaatgtgggagtcatctttttttcttttctttttttttttttgaggcagagtctcgctctgtcacccaggctggagtacaatggcgcaatcttggcccactgcaacctctgcctgccaggttcaagtgattctcctgcctcagcctcctgagtagctggtactacaggtgtgtgccaccacacccagctaattttttgttatttttagtagagatggggtttcaccatgctggccaggctggtctcgaactcctgacctcgtgatctgcccacctcggcctcccaaagtgctgggattacaggtgtgagccattgcacccggctgggagtcatctttgactcccttatgtcctttgttctctgccccacatcaaattcaccactaaatcctgttggttttgcaggttacatcttttgcaagtgtttcttctcttcacccctatgggcttcgggatgtgggtgccaccttttctagggaggagccttctccgaccctctgaagctgggttggaggtctcctttttatccccatggctttcagggcatagctcatcgcagtgtgttcttcttggcagtccccttagacagcaggctctctgagggcagcaagcatctctgagttgcttgacattgatctttaggaccacactgtccatgtttgtcaggtcaatagatgtgtcgtggtctccctcacccccatacctttggatgtcttgcttcccctgcctggaattttctttcacctcttacctgcttgtttgactcctgcatattcttcaacagaatttaacagatccagagttagctcctctacccacctgcggtattcctgcaacatccctacatgtcctgaccgttgcacttgaccatgatatatggtcctggttggttttcatttttctccccacttgaaggcagagactgtctttcatctccatattccattttccacagaaattgctgagtaaatttttgttaaatgaatgatgaaagattgaatagataggtggatggatgagcagatggagggaagaatgattaacttctaatgtgacattaaagcagattacctaatgaggacacatcagagaaagcgtgtttaaaataaatagaattcagtctgttgtttcatttacaatcgaattgaaaagatgtccttgttactaatatgttgttatttatatctgcttagctttaaatgtttttctaataagagtaatcatcatcattttcattagtgattcttgctgtgtggcttttccttttaaagtcttcccaggcatttgaatatatgtaagtaaggggtggttaggagatatagcccttacctgttcttactcctgttgaattcagagatgcatggaactcaggcccattttgttgcattttcctctcctctatcgagtgccgagaaggtggttccaagaccaggtttcagctgcaggttgagtagcaggtcatgtcttcactttctcttttgttcagaccaagcaagggtttatctctctttctctctctctctctgtctcaggtcagtctagagcacgaggagcagaaactggagctcaagcgccagctcacagagctacagctctccctgcaggagcgcgagtcacagttgacagccctgcaggctgcacgggcggccctggagagccagcttcgccaggcgaagacagagctggaagagaccacagcagaagctgaagaggagatccaggcactcacggtaggtctggggagcaacatcttcaggttgctaaaggcctcagctaggatgagtgtggaactggcactgagtatactggctcacccttagaaattccaggagggaaaacatgatccacaaagatattcagtggccaggaaattggcttacataggctgctgcttcattggaactagtagatgagcttggttggttatattcaaacttttcttagtatcttgaatagttcctcctttacttatatattttccttcttttgaaaaaatcatcattatattttaaagtttggtttcagtttgtttaaaagtttgtttaccttggctttctactttagttttcaataatcatttaaaataataataataatcttatagtagtttttctaccatatttttactttttgttttagttaaccttactcatgttactttttttttttttcaagctgtagattctgcttcctgtcttttgtatgcatctggtatgaactggatgggaaaaattctactgaatgaaagattctttctctaaaagggacctggcttccttgttctttctgagagactagtttacttagctggagagtattctcaggaggtagaacttggagcgggggtgttactggattgaaaccttagttctttttagaagtctgaaatggattttttgtggggccattttccccacatttgatcattcccacagagactgacccagaataacaaaactcacaaaaatctgatatgtgaaatgccaacttaacttgaagggggaaatgcaactgccaagttgactagggtactctgggtggccaatcttcacattttctttttcccattcagggaagtatacttagaaaatcccgttaatcttggaaggatccccggaggacctagactgtgagcatagaaggccaaatgaattttaatggctggtgtcagccaagctcatacatttctcatagtatcatactgtacccgccaagcagacaggcacacacctgcctgctggtcagggtgccctctcctgtgggccagtcacaatacagctgattgggtttagtgtttttttaataagccacctaaataggtaccttattcattctgactcaacttagatgctgtccccatttccgtcagtgaacatctctaaacctctctttgattggggttacttccgtggaatgaatggccatgtacattcattgcttacactttacctcgatgtaatgcacgtgtacatctctatatctctatctatctatctatctatctatctatctatctatctatctatactatatatatttaacgtagtttcattcttagaagttattgcccattgttgggtttggggatcccagtatctgaaccaaactgggaatgtgatctgacagtgcccgggtctgtataggaccagtccaaggtttagtggcttccagtatgtttgtgcatcctagattttctaggacttacaccaagttcagatattgactgcacatttaggttccatagtctctatgagaacactcattaaatgatgccacatcatgcccccaaaatttgctttggcaaaaaataaccacagtatgtctttgtgtatactgtcttgtttcacagtggactgaaaaccacttggaaagatgcaacacagtaaaacagaacaaaataagaaacaaaaggcaaagagaaaataagtctgtagaagaaaaaatggagctaggaatgaagttgatatataagagttcatgccaagaaggcttatagacttgctggagttgggagttgggtgggtggagagagacagataacatttcttagcttttaaagggaggcacctaaatttcaaccactattatatttaacgcaatgtatattaatattttcctcctgtacctatacccaacctctgaaagaaaaagagacatcagcaatttaatccatatttaataagcccttgctatgggcccaatgctgtgtctttagctttttctccccaggggattggtctgtaattcctcaaatccgtttatttcagagcagccgagaaggacacatttatcttgctgctctgttggaattgggaaggaggggtgactgtgtatcttatcctggccctgtttggaaggaagagggcataaaatagagcacgtgtcactgctctttatctatggggaaattagtcctttaaatcctttcttgctgctggttggaatgtgctgtgtctgatggctgctggaagctgagcacagcagcaagtcacgacttaatttagttagatgagatcactgcctcaaagcatcttcttaaaaaaaaaaataaggaaacaaacctcccttggtttagaaactagggctctgttgctcttgcagatgaagatgctgtggaaaaaacagggcttcttcaaatgatggcagaagtgccttcctccaacagctgtttgcaaacccatcatacggaaatccaaactccattttcatttgcttccattcagtttcaaggctgtgggcttttccttcccccttctcttgattatgttccataaacctggttatggacagcatgtgtttgttgcctgaatgggttagttgaatttgttctgaaaaacgtcttttccaagaaaaagcgaaaatggtcccaaaatgccatactttccaactttctcattgtttgagacctgagtggagaccctgcacaagcatcagtcaaatgaaatcagctggatctataatgatcgcctaggagatttgtgagtttcacagcaggctgttttgtcaataaaagggaatagtcaaatgtgctatgattgtttaattgtaagaggcagtcatctcctagcctgtgaaagggagcagttaccttgtttggcctccatccctgggccaaatgagatggagcacagttaaattaaagctctcgactgaagggtcttggcggtgcagctgggaggcctttgttgccgtttctaatgcttgcctcttctccactttcacttcacccatcctatcaaatttaaacagaaacatgcttttaagatacttccgtacttattgctggaaaagagacatttcagcctgaacttgatatttaagactccatctcaagggagataatttgagtctgcacaccttatagcacacgatgtgtgatgtggtataagcatcactctgaagaggaccaccaggcaagaggcgtgctgtgtgctctgtgtgcaccggccaggcctcatgaacacattttgtgttttcactcctctgttcttttaccgattctgtcaagtgactaatgttgaataatcaagagttgaaagctagagacactaatgaaaggaatccttctccctgcatagcgtgatgatgggatcccaaagtcatcctctttgatttgttaaaatcatgagtcagtgcacgttctcattctcgtacataaatatcaagccctctgtttaattaattagtaagccatcggcatgatagccaagatgtgaaatcggggcacgtaaggtgacattcttgcctggtgcctgccttcaccctgaaagggggtgggtgcacagaagcctaaccgttctagaatcctgaccatggatcccagaaggtggtcagacatctacacgcttgtttcctttcttcagttctgcagatattttgctccctcaaggctacattgtagtttacttttctttcttcttcttgtaactttcctgaaaattaaggcataaatacttccaaaagaaagtatctctctggtcttaggggcagactggctgcaacctgtccgtccacatttttgccacccaactcctaggttagtggttcccaaagtggatctgtggactcctgggtttcccaagatcagatggttttttttccttttttttgagacagggtctcactctgtcacccaggctggagtgcagtggtgcaatgtcagcacactgcagccttgactcccaggctcaagagtgatactcccacctcagcctcccaagtagctgggactataggtgctcgccacccacctggttaacttttgtatttttttgtaaagaagaggtttcaccgtgtttcccaggctggtcttgaactcctgggctcaagcaattcgcctgccttggtctctcaaagtgctgggattacagacatgagccattatgcctgcctgtcagactgttttcataacaatactaagatgtcatttaacacttttcactgtgttaatatttgcactgatggtgcaaaagcaatgttagtgttattttaaaagaaataaaaaataaatatttgaaaaatatctgtcttaatttttttgtttgtttgtttttttgagacggagtctcactctcttgccaggctggagtgcagtggcgtgatctcggctcactgcaacttccacctcctgggttcaggcgattctcctgcctcagcctcccgagtagctgggactacaggtgctcgcccaccacgcccagttaatttttgtatttttagtgagtcacgggtttcaccatgttggccaggatggtctcgatctcttgaccttgtgatccacccgcctctgcctcccaaagtgctgggattacaggcttgagccactgcgccaggcctaatttttttttttttttgagatggagtctccctctgttgcccaggctggagtgcaatggcacgatcttggctcactgcaacctccacctcctgggttcaagcgattttcctacctcagcctcctgagtagctgggattacaggcatgcgccaccactcccagctaatttttaaatttttagtagagaaggggtttcaccgtgttggtcaggctggtctcgaactcctgaccttgtgatccacctgcttcagcctcccaaagtgctggaattacaggtgtgagccactgcgcctggccatctcagtcttaatttctaatgttgcaagtgtaggtggatactacataaacaagagctctttggggtcctcagtaatttttaagagtgtagatattctctgtagcacctaatatctaattaacactcacacatttcattgagagcatccaaagcttgtcttatgcgttttgctgtctttatgtatatattctattgcatgagcttttgcctttttgtgtatttgttttataacttatttcaaaaaacataaagcatatgacttaccattttcttactgtgactagttcagtagttaagtgcttacagtaggtctagcaaccacaacagggtcagttctacattttgtgtttatatttcataaacagtaataaatcaaaagccataatgactgtggttcattatgttaactttcagagaggattgcttgacatgatccaaagtccccataatggttaattttaatggaaatggatcagtattaatgactgaaatttcagactccagtgggagagttaaatgagtttttaatggtgctgtgttatttgaaactttgctgttaataagaaagtggaatagggcttctgtccctgtggataagccagtgagcttttttatggtcaccacttatgctttgaaggagctaactccactctcagcttcctgtttctgtttttgagagatttcacaccaaatagtcatttagagcagagactggcaaattacaggccaaattttagtctgtcactgttttctgtaaataaagttttattagaacacattagaaacaaacatgtctgtttgtttacatatcgtttgtggctgcttttgctttagaagggtagagttaagtagttctaaccaagactggatactctggaaattttaaggaaatttccttatctggcattttaaggaaaaaatttgccgattcctgaccaagagtctgttaacataagggccttattctttctctaggaagaatccttgcctttggtttttggtgatcatggaagacactaaagggggttgtgtggtccttgggtctaggctgctgcttggtcacagatgagattttgacatagtgcagatagccacagtcttactttgggtaagcagtattcttatcttaacaaaggaataaatctctcattattgctgggcaaaaagcaggtagatttttagaaaaaaaattaagatctgttaaattagtccatagaatataggctagttatttaggaagtcaattctaaacaataactttttatttataaatctgtctgtgattctgtctatgcaactatctattttttggtattttatgtatttttttattgatatatcacagtcgtacatatttttgagatacatgtgacattttgatacatgcctacaatgtgtaatgatcaaatcagggtaattgggatatccatcacctcaaacatttatcttttctttgtgttgggaacgttataattctcttctggctattttcagcaactaatctatttttggtttgttttgttttaccatctctccagggctcttcattcatttgtgtagatccaaatttctggttgccattttccatctgtcggaaggactttctttaacatttcttatagcacaggtttgctggtgtcaaattccttcaacttttgtatgtttgaaaaagtttttatattaccttcattttttaagaggtatttttgctgggtatagaattctatgtggacaggtgtttttttttttttttttttttttttgcttgtttcttctgttttttatttcagcactttgaagatattgctttactgtgttctagcttttcatgcccactccttctccccatcttggtgagaaatctgtctttctcatttttgtttctcttaatgtaacatgtatttttctctggctgttttttttttttttaagattttctttttattattggacttaaacagtttcattatagtgtgctttaggttaattttcttcacatttcttatgcttggtacttacttgttgaatattttgcatctgtgggtttatggctttcatcaactttggaaaatttgtggccattatttcttgaaatattttttctgtctcctgtactccttctgggtctctaattgcatgtatgttaggctacttgaagttgtccacaactccctgatgctctgcattttttgaaaatgcctttttcttttctcattgtgtttcattttggtttctacttcttgtcttctacttctttgtttctacttgtcttcaagttcactaatcttttcttctaaagtatctaatctgccattataaactgacaatagtatttatggaaaaatagacatattagaaaaaacatcacagctctaaaatttttgactcagttatcttatagactttttttttttttttttttttgaggcggagtctcgccctgttgcccaggctggagtgtggtggcgtgatctcagctcactgcaagctctgccttccggttcacaccattctcctgcctcagcctccagagtagctgtgactacaggcacctgccaccacacccagctaattttttgtattttttagtagagaccatcctgttagccaggatggtcttaatctcctcacctcatgatctgcccgcctcggcttcccaaagtgctgggattacaggcatgagccactgcgcctggcctcctatagaccttcttatggagactttttttttttttataattaaatagaaggatcactcttacatctgccctaaactgggttctgggttcttatttgggttttcatacataagcagatgggaccatatccactttgtctatcaagtgaaaagtctgttagggcatctttgactcctctttcctcttggccacacatctatcagtaagtccttttccttatgttttcaaaggagatctcagtttcatccactttctctgtttggtttgtttgtttgtttgtttttgccaccatccttctccaagccactatcatctctcgcttgaatgacagtaacaataccttcattggtttccctgctacgttctacctttgttctattttgatcctcttctccctgtaacatctaccgtgatcttaaaacaacagtaaaatccgtcactttctttcttaaaattttccattggttttcaattaattgaattttgaatgaaacctaaattctttactggaccttcaagattcttggtctctgccttggtccctgtcatcatcttgggctacttttttttcttctttgctgtgctttttcaaaagttgaccacaacccacagaatacattttacttgcaatccaatagaagggagtatatatactgtatttcactgtttctaaggcatctgaaatcaaggtgcatattacagtcatatacagacataaacatgtcatagtttaacagcactttttctttcttaatgttacataaaattaggttttaccatggaaagtaccttaaatttgattagttatagtatctaaagcagaagtttcctataacagacctcatgtttactcctcaaggcacattctgatgttttcaattctatcttttttattctacttcactggatacaacaaaacaaaaaaccccacttgtcatgcttgctattgggtcacagcttgcagtttgaaaaactctgctctagccactcagtttttttggttgttgttgttcatcaaatgcaccagaccctttcctgcctcagggtctttgcaaatgctgctccctctgccgtctcctgtccattgcatggctggctcctcatcatcctataggtttcagcttacatgccacctcctcagagaagccctccttgaccatcccatctaagtaagtttctacctacctttcttattccttttttttttttaaactggtccctatttgttttctttataacatttgtcccaatctctaatcacgcacttattcatttccgatcttccgtcaccagaatgaaggcatgggtcatggatgcctatatccttccacagtgtcaagcatatagtatgcactaaaaaagtccttgtcaactgaaaaaatgctgctggtttaaggcagctttttcctggagaaagcctatatatatttatttcaaggccgatgtagagttttctgaatgtccgcagcttttaatgaaaaaacaacacacacacaaagtccctttgtcttggctattgtcctgtgtgtgcgtttctgtgtgtatgtgtgtgtgtgtgtgtgtgtgtgtgtgtcagggagtaggctggggaggagtcagttggagggaagagggaaaatactcatcttttcagaatgggaataggacaaatgaaggagagtaaaacttcatcctttattgctttttttcccttttctcctaatagcctgtaggtgttaatataaatgttaaaaatatttgtacagggtgtgcatgtatggtctaaagaattaattgttattaacacagcattgtgtattcctgtaacttatttctggtgttggggatgatttgattaattagttcttagaaaaacagatgctggtgccgcattctcggctttccaggcaaattgctattctctatatttgacccgtagcatgtagaattgtattctaccctatgaaaaatttataatcaacttcttaccttttaggcacatagagatgaaatccagcgcaaatttgatgctcttcgtaacagctgtactgtgagtattaattacccaaagacgattaaaataacatgaaactaaaacagaggaggaaaaggggacgtctctttaaaatattggtgactgagttttgatacgaacttgcagcttgaagaagataatgcaatcaaccttatttggagtttttgagccctagataacctgtttttgggggttcttccagttttcaaaaactgaaaccattcttcatgttttggggaagaggatagttggaagggtcaaaataattctattagtggaacaactaataggtttcagcagccgcaacaaaaatcccaaggcagttccacctcctgtcccaatgtagaaggttccatggctagcccaggtcagagactcccctgtcaccagggcagttgtatctgtgagacttgtccagattgctgcccctgcggaggaaagaccagtgagctctcctggagacctagaaattgtaactttctaccaggcaaaatttggcttcccaacatgcaaattcaaaatctaggactctttgggagatgttatttatattgagagaagtaaattctatgagtggataagcatcttccataggttatataatagagtagggtcagtgggaattcagtctatttttgatgagagtgaagaactgaaataggcccctttcagaagatggggatgttctccttattcatgtgccctctcttttctttggcctttttgtcactttattaccttcttagtcctcagtgatcttgtccttgtttgtattatttgcatttgtgaatttccagagacacctcccagcctccacacacgtacatattttattttcttgttatgagccctttctttcctctttagctactgtaaatgaaatattaagtcctaatggtatttttttcttaatttagatataaaatgtatctagtaaagcacataataatgtagtaattttaagtatacagctcaataaaatttttacacagatagacaactgggtaaccccaatgtagatcaagatacagaactttcttagtccctgaaggctccctcatgtccccttcccatcatcatccttcacccaaagggtaaccactatgctgacctctgataaccatagtttagtcttacctgttcttgaatgtcatataaatggaatcacagaggatgtgctctctggggcttagctttttttttcgcttaaatgttttgtgaggttcctccatgttgctgtacctatcaataatttgttcttttttttttttatcactgtgtggtgtttctggtgtatgaatagaactatagtttgtttatccattctccttgttggtagacatttggattgtttccataatggatcaagctgttaggaaaccccgttacacaaggcctttggtggctgtgagcacttacgtctggtgaacatatccccaagaattactaggtcatgagatttgcctctgtttgactttagtagggaactgacagaccagttttttggtctgtatttcctgatgtggtggtggatcgggatgggcctgccttaaaatgtctgtggatttcctccatccctcctcccttccttgaggagttggggggtgacattctggtagttttctgccctaggattttagtttcttgttgtcttcgtttcttattttacacaagaattatttgcttatattacatacatgcgcgtgaatgatcactgaataaaatgtagatcattttatgactggaattttttatattactattttttccttatataagcttggattttaaaaaatgtgtgcattagtaatcctgttccattcatctggagttcttttttcctttttcagtcttttggcataagaactttctaaaaaacttttttttacagttttattgaggtataattggtgtactataatctgatgcgttttaaaatgtgtgtgtaactgtgaaacagcaaaacaatcaaaataatgaattttgttattattttggataataaggttatccaaattttatccttgagcgataaaaacaaaatatttattgtattcatgaccctcaaaagtttccttatacccctttgtaattcatcttgtcccccattttaaaaactggaagtttagttttagtggaatacactagtatgtagaatgcatttggttactttctcatgtaactctaatgctctccaaatttgcatttctggaacggtgacttctaatctttgcttcatttacctctgtgttctgtggcgaagcctatgggggccttcccaagtgtgtgtgtgtgaacctgagagagatgcccttcacccacatttcagccagaggagctgggtaacttagtagtctaagtcatgggctctggaatcagatagagttcagattataaattggcctcttagtaacctacgtgtattatcctactaagcctctgtttctttgtctgtaaaatggagataacattgtataccctcagttccaatcagtacgctcattgattgtaggatgcataatttatttaataactgctctttgggggctgggtgagggaagagagagagctgctggttccagtataccacgtatccacatttcagaaacaatacaacttatggaacactgagtcatgggatttggtagtagtacctccctcataaggttgctgcgagaattaaatgagatacgtgcaaactgcttgcacagggcctgatccatagaaagtactaaacaacattggttactactattattttattctcctgggcttataatataatcttttgtttggaaaatggctctgctgctactttaaaaagtttgaataccactactttagaacaacatttggccacaatagtaggtctcaattatacttttgcaagttcaagaccgctttaaagacacttcagaggagtgtgttggaggttcctttctttcttggcattgcccaagattgtctccgctaggaaatgtcatctttgtcatttaaaaatgagttattatgggagttcccacaactcccataataactcaattgataggagctctcttcagctttcaaaaagctcatgcacagtaagattttcaagctcagaccatttctatattttgaagacatttaaaaaggatttgattcaatctggcacctaaaaccctacctaagtctgttttagaggggagttggtgggcaaacatatgacacagttttaattatgaatcaatctgtcagctataagattaaaaataaataatatgcaaatagctgccttcagaagagaaccaggcattaaaataggatttcagtcctgtgtctgtttagcctgatgctcattatctgactggtttcttcacccctaacatgccattggacttttacctggtaattttcctctcctggtcttccagttaggtgtgagaggttcacatcttcttctcagaaccatgatagcactgaaaaacaacagataagcccaaacagagctgtttttttttctttttgacactgagagtagatcttttttttttttttttctggagattgagtttctctcttattgcccaggctggggtgcaatggcgtgatcttggctcaccacaacctccgcctcccaggttcaagtgattctcctgcctcagcctcctgggtagctgggattataggcatgtgccaccatgcccagctaattttgtatttttagtagagacgggatttctccatgttggtcaggctggtcttgaactctcaacatcaggtgatccacccgcctcagcctcccaaagtgctgggattacaggtgtgagccaccacgtccagcttagatctttttttttaatatcttctgtcttagaactgtaccaagacctctcatctgtaaaaacagcatataagaaagctctgctggcgcctgcgttgtgaagatattttgctcatctttttttgctgctaagatggaatcagcctttcagtttctcttttttactctctatctttggggttaaaaggttaacagactcatagtaaacaaatcatttgtccttggtgggtagagaatatacccaggaccagaaagtagacctaacaattttccttgcacattccctggatcaaaatcaagaggggttgtcctgaatggtcaatatatcttacctccatcatttcagttttcaaagatctgaataaaaaagtgaataaacacttctatccctattttagacaggcagtatggttcagggggcaagaatgtagattcttgagttttagtgttgggttcaaattctggctttgttatttactagcagtgaccttgggcaagttacctagcatctctgtttccccaatttccccatctataaaatagaaataaaataatacctacttcaaaggacagtagtgaacattgcctgttgttatgccttttttaaaaaatccacaaagaccattaatttactgcctatgtcataagtcagtttaatatctgtaaactcagtaacgtatgtgtgtgtgtgtgggtgtgtccaacgtttaatatcatgactccagcaacttgaaacaaggtcacaagctaaatgtgttatggcttgggtagatagaatatgtgtataaaaagtccaaatcaattaaaatgccttcaatctcggcatgggtactttacaaaaacatgtaacacttctcttgtcaaatgggcaaaatagagatgatgaccaaatatagaaccagcaatcacaaaccggaaatataattagaggcgtgagaacccttgaaaactggatgacaacagggaaatagaaagacccttcttattccaatgggcccatctcaattgagtgatacaaaattgccctttttcaagtgtttcttctttagcattttataatataactttgggagaaaaagaagaggtggcagaaatgggctaccatcacaaatgataaattgcatttttttcgtgaatcaaagaaagcaggtacccaaagtcttaagtacatccttgaatggcaagtaaattattttggcaatgatgtattttcatgtgagtagactttctatagtctagtctatttattccccaagaggctttttttttttttttttttttttttttttttttgagatggaatcttgctctgtcacccaggctggagtgcagtggcgcaattgtggctcactgcaagctccgcctcccgggttcatgccattctcctgcctcagcctcccgagtagctgggactacaggtgcccgccaccacgcctggttaattttttgtatttttagtagagacggggtttcaccgtgttagccgggatggtcttgatctcctgacctcatgtttacatgatgcattaaggtcaaataacatgcaagaaaattaaaataattaaaaaggtaaaagcagatgagtaaatatagtgttcactcccatgtcacagatgaagaaaccaacccagcaaaggtcagatggcttattgggggttccagaatccattttatatcttccaagccagcttgcctgtcttatttttctttgggaaagaggtagggggaggaattagtagttaaatggagacattatgaaaaacatcttaaggaatgggtttactacgtacaggaaggagaccagttgaactagtgggcattgtttattcattgtttctggttttaggagatttaacatgccacagaaagggaaaggcagggaccctgcaagtcataagtgtctgttaggaatggcaaacgtacagattttccttatttgtcttccttgataaagaatgtatctgagctaagaacctgaccagataacttttattccccctcttgtagctgacagtgtacttcaaaatcgtacataggaattaatgtggcttttgacattaaaaagcaaattactagaccattagaccatacactaaaaggttatcagctcagttaacaaaatgaaaagttgtatctcctctgagtacatttgtggacaagtgtacttaattgatgttctttaatttcatgtgcctgggaagatttttttttaaattgataatcaaagagggttaaaatagggaattagtcatgaaagcaatggcaacatttcataaacgaaatcgactctaggtttgaaaattggaaacaattaataactgtaggcttaacggcatttccttttaatttccttctttttgttacgtaaaatttaatttactgcctgtgtgcctcagtccaactattattagaaaattgcccttaaacttccaaggtattatacataaaagctctctgcaagccataatactaaatctcagcaaagagaataggaaagctaaatgttctgaaattgaagtcattctgctactgagcaggagagtaatttagcaaaccccgattaaatctctctcaataaaataacaatttcatatacatggcttcccattgtctgatagccaactgtatagtaaaatccattaaagtcatgccatagtacagtgtattgtattttcagggtttttctgagtttccctgaagtttttttcctttgttgtatgaaattaaatttattgcttgtgatattatcgaaataactcctggcgtctttccctgtcagtcttccttgataagaacttcattttgctttctaagactatggccatctccaataataaggtcctagtgatagtgtcatgggcatttttagcttaattagtggatggtgataccagtctattcttaatttgcattttctttccacattatattatttccgtcaatttgatctcattcgaagtcatccgtttcatgcagtgattacttttgattgcttttgccatattttttagatgtgtcctgagttagagagaaactgagtctttttcttccactgctcgtgtttagagttaagtggctgggcataggagcttggacatggctctcacggtcaggtgggcaaactcatgagcggcacgttgattgccagtgtcacgtgggttcagaaatccatagccctagaagcaatttcttatttgaaatgaatgtgcttggcgtgtaactggattcctttcctcttttaggtaatcacagacctggaggagcagctaaaccagctgaccgaggacaacgctgaactcaacaaccaaaacttctacttgtccaaacaactcgatgaggcttctggcgccaacgacgagattgtacaactgcgaagtgaagtggaccatctccgccgggagatcacggaacgagagatgcagcttaccagccagaagcaagtaaggagggttaacaaggtcgtgagatccctggaggacttttagaaggattttaggagtgcttggtgcgttctcccaagggttccaacactgaacctcatacagtaattgggctctttttaaaatcatgtcttttttccaagcctttagggttttaaaaatgtattttaaaagtgtgtagttcttattaattttgattttaaaaaatagggccagtgtggcagctcttccctgtcatcccagtactttgggaggccgaggcagaaggatcacttgagcccaggagttcaggatcagtctgggcaatatagtgagaccccatctcttaaaaaaaataaaaataaaaaagataaaaattagctgggcttggtggtgcatgccagtagttccagcttttcaggatgctgaggcgggaggaacgcttgaacccaggaggttgaggctgcagtgaactgtgatcatgccactgtactccagcctgggtgacagagctggaccctgtctcgaaaaaataaagatagataaaaacaaaatcaaatgctttgggggatcaatgtaaatggcttgattttaagcttggtcacttcccctggctttgctttggatcctgcctctaaggtggctgcagaactggcccttcatccattcttgcctggtccccttgggctgcagaagcaaaagacaaaccgcatttcaaactgtagttagaaacttgtgcttttctgaaactgacccgaccaaagtaatctccaggaaatccttgtttaaagacaaggcacaaatcagtgctactgatttgcagacgatggaggctctgaagaccacgtgcaccatgctggaggaacaggtcatggatttggaggccctaaacgatgagctgctagaaaaagagcggcagtgggaggcctggaggagcgtcctgggtgatgagaaatcccagtttgagtgtcgggttcgagagctgcagaggatgctggacaccgagaaacagagcaggtggggctttgtgtttgtggaaagctcatgacaggtgaccgcaggaggatcggcctgagagttgtggacagggtgatcagctattcccgccgagactgagaagtttcctgggtcacaagcctcctggtgctaaaaaccaggagactcttgggcaaaccaggatagggtggtcaccctagttgtaaacgtagatagtgtgagttggattctgtggctatgactggtatctgttttccccatgcagaggcctgggcatcagggcaaatacctctgttttctgtgcagaaaactctcatgaggtttcttgtcagagtgaccatagcaaggccatagcaaaaccattaccattttaatcctggtcttccctccaccccagggttcctcaaccttggcactattgacatgtcaggctgggtcattctttgttatgggggctgtcctgtgcattgtaggacgggacagcatccctagtctctactcactagatgccaccaacaacccccttcccacgttgtgacaacaaatatgtctctagacattgcccccaatatcccctgtgtctccattgtccccagttgagaaccactgctgtacaagaatagtttagtgggttttttttgttttttttttttttgtgacagagtctctgtcacccaggctggagtgcagtggcaccatcgcagttcactgcaacctccacctccagggtgggaggaattctccttcttcagcctcccaagtagctgggaatacaggtgtgcaccactatgcccggctaattttttttttgtatttttgtagagacggggtttcaccgtgttggccaggctggtctcaaactcctgacctcaagtgatccacctgccttggtctcccagagtgctgggattacaagcgtgagccaccacacctggctggtttttttttttttctcctttcttagtaggaaatgataataatcagttcaggcagtatcgttcctctgctttctcacttttgtttccacagttccccagtatagatttcccttcctgtggggccacagtggcacaattgcgtactccatagttctaagggttgctggtcacattaaagatgtcatagactggaagagttgttatgacagttttacacagctcatggcagaaaagtgttttctttctgacaaaattggtacgttgtgacatttcacagatggaaagaaatggtctagaaggacgggtgccgctttccagtttgtacaaaggcatgatatgggctagtgtgtgccccgtgacttcctgtctgcacagctgaatcggatccatttttcatcaacttgctcatgtcaccttcctctgaaacttaccttcctgtgattctctgaactccttaagcaagattagctatccatagaaatatcgatcaatgaattagtctgtattacactcacttgggtatctatctctcacttttgcttggccatagtaggcttaactaaatatgtcagatggattacgcaaagttcagttgagctccaaaagtttggaggtaaaagatgaaaacccttacatttcaaaagaaatggtagaaatagttcctttttgtagatcctcccagcttccccactcagggtatttgttgatgtgagggactgctgtttaagtctcctattccagcttccttctgaatccttagactcccccatcctcattgtaagttctggttgttttcccacagaccccttccctcccaccctcaagtccagctcctatcctagctgtttttagggacctacagagatcatttttggggtaggatctggcttcagcatcaagaaatacacgaccatacatggaaggtataattatgaactgttctcaggaagactagcattagtctgctttcatttcatgtctgctttcagggcaattgtggaagatcgtgcctttcttttccttttttttcttttttctgttttggtattatatgggatactgagatgagtaaaatataattgttaatctttgtcctcaagagcctaagagtctactggaggagatatggattcagatatttaggagagatggggaggccgaagtgggtggatcacttgaggtcaggagtttgagaccagcctggccaacatggcgaaatcctgtctttacaaaaaatacaaaaattagccgggtttggtggcacgtgcctgtagtccaagctacttgggaggctgaggcaggagaatcgcttgaatcttggaggtggaggttgcagtgaactgagatcacgccactgaactccagcctgggcgacagagtgggactccatctcaaaaaaaaaaaagtatatatatatatatatatatatatttaggagagaaatacagttatgcttttgttacagaacaaggtgaggttgctcctgagaagagaaagtgggaatagttttatggagatcatagcatttgaatttatccttgaaggctgagtaagatttgagtttgcagagtagcaaaggagggaatggccagtggaggagattgtataagccaaagtgtggaagtaggaagcatgatacctaaatggggaaagggaagtgatttttttttcctattttgcttctggtttttctattctttagcattatttatggagacactcatcagattcaagtttcacttttgttttttctttttttttttttttttgagaatggagtcttgctttgttgcccaggctggagtgcagtggtgccatctcggctcactgcaactctgcctcccgagttcaagcaattctcctgcctcagcctcctgagtagctaggattacaggcatgcgccactatgcctggctaattttttgtatcttttgtagagacggggtttcaccatgttggccaggctggtctcgaactcttgacctcaggtgatctgcccacctcagcctcccgaagtgttgggattacaggcgtgagccactgcacccagcctcaagtttcagtttcttgatgagtacccaaaaacatttaactttgtttttgtttttgttttgttttgagacggagtcttgctctatcacccaggctggagtgcggtggtgtgatctcggctcactgcaacttccacctcctgggttcaagtgattctcctgcctcagcctcccgagtagctgggtttaggggcgcacgccaccacacccagctaattttgtatttttagtaaagatgggatttcaccacgttggccaggctggtcttgaactcctgacctcaggtaatccacccaccttggcctcccaaactgctgggattacaggcatgagccaccgtgcctggcctgttttgtttttccttacccaagcctaacatgggtcaaatctttgctttgtaagctgttggaaaggaagacagtttggaactaagagtcaaggttgggcatctttctggcctgcagcctgtttagttgctcgtcaggattagagacggaccagccttctttccgcaggtcagctgttggggggctaccaaaagctgacctgtgtctttctggcagggcgagagccgatcagcggatcaccgagtctcgccaggtggtggagctggcagtgaaggagcacaaggctgagattctcgctctgcagcaggctctcaaagagcagaagctgaaggccgagagcctctctgacaaggtcagcgcccaccccttctgctttttaggaaaacattttcgtttccttcttttaaaggcacgcttgataaaaattcaaatgcaatccatggcaaacatatttcataaacatatgttcatgcactccaaaaatgtcccatggttttgccttaccatgggacatttttggttggcagtagcgtgggtgggtgcggtgggtacccagtgatcacagtcggccagtgactttttaaaatctgtgtgtctaggcccttgaagttcgaattttgatctgggtgttctactctctggttgtctggcatcttatttccagaaggctttatggattgaatgctgtgcatctttgggaagttcttggtggcagtgactaatgctcatccaattgctgcagtaataggcagctcagcttctccgtgttccaagttcagggtcgtgatagggtctgatgacgcatgctggttctcagtatttcacatcggaaatacacgtgttccatccatgtgcctctccatattacatttatagtcataaacaatgttttggagattttagctaataatcttgagagagatacagaataggcgcttcagcgttacagatcaccaaagtgaagatcagaggacttttatgtatgaacacacagatgcatacatagacactctttttcatgcacatacacacacaaaataaaataacgatctgattttatattttctataactttgttatttcatgatagaaaaataattatttgggtcattgtggaaaatatagaaaccacagaaaagtaaaagaaataatggctggtcacccatcgctgttgttttattggtgtatttatttgcagtctctgtgcttatgtttatgcatacacacatatacatagacatacgtatgtatttttataaattagattttcattatatatacagctttacctgtttttattaaaaatcatttaacttcaggttttttctgagttgaatattttttgaatatgtgattctaaaaaaaataaattgcatggaagtacctacttgaatcattatacttgtattggaaatttgaacttccagtattttaccatataaataacaatatgataaacatgaatctttatggacatccatgattattttcttaccggatacttatattaatagaagcagaattattaggtttaaggccagagctctctagtcaggaatgctcctgagttccctgaaactgggttaccattttttttaagcatgaggaaactagatttattagagctatgtgaggccttttatgtttaatgtgaaaaatatttttttctagttgactgttcttaaaatgttaagcagcaaagtccttcatatcttttaaagctccagactttgcaataccttattgtcttgatcttctcctaattgggttgaatttctttcccaagcctttcttatcaaacttataagctgacagagcagtcattatttgcatacatgtctagttatgggcctttctgacttgacgtaagatccttgagagcttggttatcctttcatcctaaaagctataatgcaggtagtaagcattcagcgtatgattatttaattaaattcagccaaagcatgtcagataaataagtccttgagcagttatcctcctagaacttgtcacagccatatttaagagccatcccttagaaataatttccatcctcatataataacctatggaagactcaccagtgacagggacttctgtatttagaaaaaagcaacctttacgttctgacctttagaactcaatattctttctccgtgaaggttcgtggacattcataaacgttgtcagcatctaacattcctaagtgtggcattatgccaatctttccaaatgtctagctcaatgacctggagaagaagcatgctatgcttgaaatgaatgcccgaagcttacagcagaagctggagactgaacgagagctcaaacagaggcttctggaagaggtgagtgtgaaatacctgggagaagggccaagtggattttttttttcttttaataggcttcttttttttggagcagctttaggttcacagcaaaattgagcagaaagcacagagagttcccacatactccctgtctcctcctcccacagtgtccccagctatcaacaccctgtaccagagtgtccatttgttacaatcaatgggcctgcactgacacatcgtcatcaccccaaatgcatagtttaaattaggtttgctattggtgttgtatgttctatgggttttgacaaatgtgtaatgacagttatccacctttactgtatcatacaggatagtttcactgccctaaaaaccctctgtactctgcctgttcatccctccccaccctcaactcctggcagccactgatctttttgctgtctccatagttttcccttttccagaatgttgcatatctggaatcacacaggatgtagcctttcagatcagctgctttcacttagtcatatgcatccaggtttcctccatgtcttttcatagctggtagctcatttctctctggagtctttttttttttttggtcttgctctgttgcccaggctagaatgcagtggagcaatcactactcactgcagccttgacttcctgggttcaggtcatcctcccacctcagcctcctaagtagctgggactacaggtatatgcctccatgctcgactaatttttgtattgttttgtagagatggggtttccccatgttgctcaggctggctggtttcaaacccttgggctcaagtgatctacctgtcttggcctcccaaagtgttggggttacaggcatgagtccccgtgccctgcctggacttgtaaacaaatttctttaaaagatttttttatttcaatagctttaggggtacaagtgtttttttggtgacatgggtgaattgtgtggtggtgaagtctgggcttttcgtgtacctgtcacgcaaatagtgtatatcgtacccgataggtaatttttcatccctcactcccctcctcgccttcccccttctgaatccacagtgtctattataccacttgtatgccttcatactcatagcttagctcccacttgtaagtgagaatgtgcagtagttagctttccgttccaggtggaattttgaaattgacaatttgtcagatccaaattagatattttgaaattagaattttcaagtaagagtatgggggtcatgtaatacttgtcttaaggtatttaacacattaaaagactatgtcatgaaggccagagggtctctgtcatttttatccttctatgtgatgcttaatggagtgtcaagcacatagtaagtgtgtgccaaatagaagtttattaaatacatgggtgaatgaatattgagttaaattgttctttagagctaatatccaaagtatattaagtttcatgccgataggacatccatgcaaattagcttcctgcacagggcagaattttatcagattattctgagtaccaaatttcatgaaggtttttgaacattgggtaatttagttaaaaataatgtgtgccctgcttttgaagcataatagacaagctcagactgatcttctaaacccatcccttacgtgatggctggtaccttttcacagaactctgagaacggctatttaaattgatgactacctcccactccccaaccagagccctgtgtgttgaatcactgatgattccgctttgttctttaggattgacctgcaaggacaaatgcactttataatgaaaaattggactccaaagagtattctgtttaacccttagtgagcctgacagtttaattaaccagaatgccctgttctggctgatgaggttttgtcacgtgatacccatagctcctgaggcactttgctgatagaaataatattgttatgctgttaagtttgaaaagtatagtgacatttttgcgggtgagtataaaatattttattgaatgatactttaaaaaatatgggtggctgaggcgtgaggattgcttgaggccaagagtttgagaccagtataggcaacatagtgagaccccatctctacaaaaaaaaaaaaaaaaaaaaaaaaaaattagccaagtgtggtggtgtgcagttctagtcccagctactcaggaggctgaggtgggaggatcacttgagcgcaggtgtttgaggctgcattgagctctgatggtaccactgcactgtagcctgggtgacagagtgagagcctgtctcaaaataaaaattaaaaattaaaatgaaaaatatgggtgggagtttgagaaagttctagaaatggatggtggtggtggttacacaataacatgagtgtacttaatgccactgaactatacacttaaaaaatggttaaaatggtaaattttatgtcgtgtattttgcctctgtaaacaatttaaaaaataaaattaatactaaacacacacacacacacacacacacgtatatttggtgaacacacataggaattcaccccgtggccttaagaacaacactacagtggaaatgttaaatgtacctcgtggtcaaatagagaattagggtcttttatctgcagtgaatagacagtgttcccacttaggcacatcctgcaaacagaaagaacagaaataatcaatgctcttgcctgtcctattttccttctgagagggcgagttggccctgacagcccagtactttggtccaaggttatgtggtgagtcagtgacgactctaggaatagagtgccgggatcccaattcagttccctccttctcacttctaacctacatgagaacatttccagtttcccaggatgttcctcacagaaagatttttgagcacagacttctggctgacattgagccggaggcagatttcagtgacagttgaaaccattctggaacaaagaatgctctttattgtccacattgtgattgggcctcctggttggtgtgtgctgtataagcatatgtgcccaaggcttccacctaagtatcctcttcgtaggtgcggagacttttattttttatttttatttttattttttgagacagagtcttgctctctcgcccaggctggagtgcagtggcgtgatcttggctcactgcaacctccacctccgagggtcaagcaattctcctgcctcagcctcccgagtagctgagattacaggtatacaccagcactcccggctaaatttttttgtatttttagtagagacaaggtttcacgatgttggcccagcttgtctccaactcctggcctcaaatgatccgcccacctcagcctcccaatgtgctaggattatagcatgagctaccatgcctggcctataaggagacttttaaatggagccagaatcaaagtctcagaattgaaagaatttttatatcatccagtctgaatttccagcactattccctttatccttgctcctgacaaactttactaatggatctttcacatttttcctcctgggcccaaaatggcttcagaagctttctcaacatgacactttttttttttttttttttttttttttgagatggagtctcgctctgtcgcccagactggagtgcagtgatctcggctcactgcaagctctgcctcccgggttcacgccattctgcctcagcctcccgagtagctgggactacaggcgcctgctatcacgcccggctaattttttgtatttttagtagagacagggtttcaccacgttggccaggatggtctcgatctcttgacctcgtgatccacccaccttggcctcccaaagtgctgggattccaggcgtgagccactgcacctggccaacatgacactttatagccactatctgttcattggaagtaatatcagtgatcaaagtccatttgctagtcctggtcaaattcatctctcatccaaggtagaagatcccttccccaacgctcctcataggtaggccccgttgaaccttggcctaaatacttacaatgactttggacatcccaacccatttttcagcaactctcattcttagaacattcttattttgaactaaaaaccttccacttttacctattggttctattacattaaaacacatgaaattagaaagtagtctgatatctccaaccaaaatgggagattaatactgattaatagattacttgattaataattaaaataactaatgtttaattagcacttaccatgtgactgactctctgagtacatgaattaactcttacagtccttgcaatgttcctgggagataactagttttattatctctgtgacagtcaactagatatccaaatagctctcccactccaaattgccttctcttttattttttcaagtatttttgtagagacggcgtctccctatgttgccctcaaactcctgggctcaagcgatcctcctgccttggcctcccaaagtgctaggattataagagtgagccactgcacccggccaccttctcttttttaagtgaaacattttagatcccctcaagctttggatgttcttttctggtagatttgtctttccacagagagtttctacaagtccatgtggtctgaatagcactgaatacattgggatctttccgtctccatactgggctctaaacctctgccaattacctgtgctctttgggtagttttgatcacatcattgacaccactggtctgttaaatcactacctgcccttccacaagtttgctttttcttaaaaacatctttatgttctagatttattccattgacaatttaaaaaataccgccctactgaagtttttcttgttggtcttgatccattcttccagcccacgggggttgtttcatgctcttgttctatcatccaggccctttctttttcctcccagtttcctgtctttttccttacagtttcctcgtgaaattgttggacaggtctaaacacacagctaagatccccctttcagcctaacactggcccatgaatatacctctgtttgcttctttctgggaagcaggtaaatgcttctgaaaaacatttcatagagtacaaatgccccgcttacttttttttttttttttttttaatgtatagggaataaccagcctatttcttggaaagctaatggacagttgatgcgtttattctagaaaaatattttgggctcggctgtcaccaaacagattctcgtccccagcacttgtttctctggtttctgcctagtaattaatgttgtcctaaaatagtgggaagaaactaaagagggtaatttgcagaagaaatcactcatgctgcggaggagggtatcttagctgtttctttccttttttcctgtattttagggggctctgtggtttgattgagaaattccagattacgcacacgggccaaatgattttttttttaaattttcgtttttatttttttagagacagggtcttgctctgtcgcccaggctggaatgcagtggcataatcatagctcattgccacttcgaactcatgggctcaagcgatcctcccacctcagcctcccagagtcctgggatttcaggtgtgagccactgtgcctggccccaggtgatctttagttggtagctcttcctttgtggcagtactgttagggaaaggcagacgggaggatgagagggagcaccttaactgaatggagggaagaaagaaggacaaaggagatggagaggataaacattcaataagcacctactgtatactgggcactttgttcaatatgtcatccaatgaggcaagctagtatacccactttcagatgaagaaactgaggctctgagaggtgataaatacagattttaacaggtatcagtgatatgataagtgtaaaagtcaggatttaaaccagggtctgtaagaatccagcatccaggtctttctactgcaacacgatgccttagggaatcagctacatgttaagaggaagggcaggtgaggaatataaatggaaagaaaaacagaggtagagagaagcaaagagacagagagggccaggaaatgctgagattatcagtggctctgggcctgctgggatggaggagtttgggggctgccataggccttttggaatctccagtgatgatgtttattgctttgagtagctctctgtccctaagtctgcagaggacccaggctaccagggaagagattatttgggccacactaagtgtagttaagctataatccagggtttggataaaatcaagcactgtctcatcaggatgcctgctctctcctgcttttttagaaacggatgcattttaggaaaaagaaccacaaaaccagcgtctttatagcctgtcctattttctggttaacttccattataaaaattggagcgagatttgcagcacaaaactattttcaatatacttaattgaatttcttttctgggttttaccaacactctgtactataactgggatcttcttcttttcccccaacgttgtagaaatatgtctcatgattgtggttattcatgtacttgttggggtctcttaccctaatgggacctttattaagtaagggatgatatgatttctctttgtgtatcccacactgcctgcatggagtaatttctcatagcaacaattaagatcttgaaaacagaaaataaagacattggaacttagttgtcatggcactgagtcgaactgccttagatgtcaactcagatggctcatgccatccaaaatatcctcaccttaatgtaccaaaatatcctcaattggaactctgtctgggaaggccatccctgcagcctggacttcctgtgacggtagggatcctcggacttgttggccagcagaggtttctgtgcaaattcattttaactgtgcttgcatccttttggaatagatgacaattggtaattctgaattgagatgatttcaaaagctgtacttctggtgccatgcctgaaattagtttgaaataggaacagcaggggaacaaattgtattgtgtgcagtatcaagcatttccctggcccttctccccactagcaagccaaattacagcagcagatggacctgcagaaaaatcacattttccgtctgactcaaggactgcaagaagctctagatcgggctgatctactgaagacagaaagaagtgacttggagtatcagctggaaaacattcaggtgaggactggcagagggaatctgcttaaaaatggtctgcacggctgggcgcagtggctcatgcctgtaatcccagcacttcgggaggctgaggagggcagattacttgaggtcaggagttcgagaccagcctggccaacatggtgaaaccccatctctactaaaaatacaaaaattagcctggcgtggtggcgggtgcctgtagtcccagctactcgggagactgaggaaggagaatggcttgaacccgggaggtggaggttgcagtgggctgagatcacaccactgcactccagcccgggcaacagagcaagactttgtctcaagaaaataaataaataaataagtctgcagaggcaaagcatgattgtacagtcatctggtaaaatggtcagtatctttgtgctgcatattgtgtgtattttccccaagattttattttcaaagattgcaaacattcagagaagttggaagatttctatagtgaccatgacctacaaggaacctgttgctatttttactttttcacatatttatctataaatatatcttttttctcttttgcagtaaaactggactaaatacatactgactcagtactgtttgtgttggattttcatatattagtgtcctaacaacttcactttttagtttcttaaagtaccaactttaaaagtatacttctgtctggatttgaggttagtttgttttcttgaattttaggttctctattctcatgaaaaggtgaaaatggaaggcactatttctcaacaaaccaaactcattgattttctgcaagccaaaatggaccaacctgctaaaaagaaaaaggtgagtcaaagtgtttgaaaagtgggaattgtcagtttcactcatcattcatggctcagtggacaccactgtgatatatgatcataggaacatagaagaaaacaaagtatactttttttgttgttttattttgggttgaaaaatagattttgagataattataataggtcttactgaaagatatcagtgatcaagtctaacaaactactttttgtttatgaccattcaaatcatagtatctttgttaaagaagtaatccctccccagcccacacacatagcagttggggcagagggatgtatgcagagagaaagatttataccaagtcatgcatacatgactctagagggagttagcaagtcacaagtatggggcttcagcagttcaggtctctcgtaccacactccagaaaggactttaacagtgatctagtccagtccttttgatcggctcacaaagagactagaactcagggagctggggtgacctgcctgaagtgtctgactggacacttctcccctctgccaagtactgaacaacccttttagattgcaggagacaaattacaaactaggggcagggttatacatagtgcacatgagaagattgtttttcataagcctgatctatacatgctttcccaaaccactaaagccttcatactaggtttggccaggtgttctcagttccagaaaagtcttgaagaagcttgcagtttccttccaaatgcagaagcataccatagcagcagtggcagtggttttgcaggagaggccttgatgacttggaatacctaggaggaaggagtggagggctgaagttgacagttgtctcaatatttccggtgccatcttcgctgtaagggcatgagcacaacattcagaggccgcctcccactagacgttggctgcacgggaaggattttcttgcatgctgcgtgactgtatatggttgttatgcttatgatatttaatcttttttattttagcagtgaactgttacctggttatgtcacttgatttagttagggtgtttccatttgttattttttttagttaccttttttttaagttgcattattctgttttccttttttttccatgtatagtaaatattttcatttgcatttttttttgagtaagccccttgttttgacctcattttagcattccttttaaaattttgcttccttttacaaaacactcatctctgtgtcttgtaactgagcatcatgagacatattccaaggcaagagtgacctctgaaccatctctcctgactccatactccatactctcctgattccattttttgaatgggaaagactcaggacatgactctcctgtcttggcaatgctagaggaagaggtggtggccattcaagcatctttaatcctcttggtgaaaacttccgcacccctatttttttcagccggctggaacgggctgtggctcagcctacccttcccccccttcacatgccatttttactaaatacacttacagtgagtatgctcctggcttttgtggtttgctcctcccgagtcagatttcctttagctagtttcaagtgccagtttccaggagttaggagatatctctgtttccattgctagggtttatttagtcgacggaaagaggaccctgctttacccacacaggttcctctgcagtacaatgagctgaagctggccctggagaaggagaaagctcgctgtgcagagctagaggaagcccttcagaagacccgcatcgagctccggtccgcccgggaggaaggtaggggctcactctctccaaaatgctcaaggatgtggaaaaggcagaggattgatctcagtgagatcagccaagactaactagctcagtgtcttcgtttatggcccatacgctttcagaccagacatcccatgtctgaaaaacgtatggcccctgtgcattgccaagttgatgtgacgcatattcttttggtcttgggtccttgaaagatagcccagggacattcggcttagtttggtcctctaggcgacccagctaaccaaaaggcattgtcctggtctctctgcagctgcccaccgcaaagcaacggaccacccacacccatccacgccagccaccgcgaggcagcagatcgccatgtccgccatcgtgcggtcgccagagcaccagcccagtgccatgagcctgctggccccgccatccagccgcagaaaggagtcttcaactccagagggtacgttggagttgtatggaaatttcttttagtcgactaagacatgtgggcatatggtaaaaattacaagtaatactaggggttaaagattaaaaagtcagtcttggccaggcacggtggctcacacctgtaaccccagcactttgggaggccgaggtgggcggatcacctgaagttgggagctcaagaccagcctgaccaacatggagaaaccccgtctctactaaaaatgcaaaattagctgggcatggtagtgtatgcctgtaatcctagctactcgggaggctgaggcaggagaattgcttgaatccgggaggcggaggttgcggtagccgagattgcgccattgcactccagcctgggcaacaagagggaaactccatctcaaaaaaaaaaaaaaaaaaaagaaagaagtcagtctcctggctccccatcctcagtgttggttcatatatgtgaccacatgtctataccattcatgtatcttacattgtgtgattatatttaaagaatatgagaaaataggctgggcatggtggctcacgccagtaatcccagcactttgggatgctgaggcaggcggatcacctgaggtcaggagtttgagaccagcctggccaacatggtgaaacctcgtttctactaaaaatacaaaaattagctgggtgtggtagcattctcctgaagtcccagctacttgggaggctaaggcagtagaatcatttgaacccaggaggtggaggttgcagtgagccgagatcaccccactgcactccagcctgggtgataaagtgagattccatctcaaaaaaaaaaaaaaaaaaagaaaagaaaagaaaaaagaatatgaaaaaataagcacatctctctctcaggccttttttcttttataaatattatagtggtggctcacgcctgtaatcccagcactttgggaggctgaggtgggcggatcacctgaggttgggagttcgagactagcctgaccaacatggagaaaccctgtctctactaaaaatacaaaattagccgggtgtggtggtgcatgcctgtaatcccagttacctgggaggctgaggcaggagaactgtttgaacctgggaggcagaggttgcagtgagccaagataaagccattgcattccagtctgggcaacaagactgaaactctgtctcaaaaacaaaaacaagaaaacgtaagcttatctttcaggccttttttctcttataaatatcatagcacactacagtatacactgcaagacaccttcgtttcattaaagtgctatcttagaggtttcacattagtacataaggacctaccccattctttcagagaaccacacagtattccgtggtgtgagcatgcaattcacctgttaagccaggctcctgttgatggccatttaggttgtttccaatcccctgttactgtaaacaccttgcagaggacatcctgtgcctctgtgggtgttgtgcctggagaaattcctgggaaatgaatcactgggttaaaggtcatgtacattttgagtgctggtagtttgtgccaatgtttatttctaccaacagtgtgaggagttttcttgctggtctcaaatgtactccatttacctagagattaaaaggacttaagaaaaggccaaggaagctgtttggaatgtcttaggaacactagggtagagctgtggtttagcaatcatggcattgcaatcaaacctgttttggttgtaaaccagatggtgttttcttgttgctgttgtttttctttagcctgaagtcattttcttcctcctatgtttatataactccttgaatcaaagagctttactttttttttttttttttttttttttttttgagacagagtctcgctctgtcgcccaggcttggagagcagtggtgtgatcttggctcactgcaacctctgcctcccaggctcaagcgattctcatgcctcagcttcctgagtagctgggattataggcatgcgccaccatgcctggctaatatttttatttttagtagagatagggtttcaccatgttggccaggctggtcttgaactcctgacctcaagcgatccacttgccttggcctcccagagtgctggcattacaggtttgagccactgtgcccagcccaagagctttacttttaaactcattaaaatggtgatgacaagatagaggaaagcattgcttctggctgtggtgtccactgaaatgtccctgaatagtgatagtactacagtatattgctcctttgtgtatactgcaccacacagtttcaaagtgcattcctgttatttattccttgcacctttccaagaaaggaaggggggtgatgttgtaaggagagcctaccgtatagtcagtcaatctcctaccagtaacatgttcttaaagcctgattcctaatcactggataatggagattttaagttgagtcttataaatctagatgcatctgttagtgttaatactttcaaaatctgtaactaacctgttctaatggttttaacagtttcattcagatgtaatttgcataccgtacagttcgctcattaaaaatgtacaattcagtctttttcagtaagtttacagggttgtgtaaccctcatcacattctaatttttgaacaattttgacacccccccacccaaaaaatactccatacacattatcagtcccccgccattctccttccactaatgttcttcttagcaaccaccaatctactttctgtctctgtcgatctgctctcttagacatttcataaagatgaatcatactgcatgcggcctttgtgtctggcttctttcatggaatgtaatgttttcaaggttcacccatgttgtagcatgtatcagaacttcattcctttcatggctgaataatactccattgtgtagatggcacatctgattatccattaatccattttcattagtccattttcacactgctgataaagacatgcccaagactgggtaatttataaagaaaaagaggtgtaatagactcacagttccatgtggctggggaggcctcacaatcatggtggaaggcaaaaggcatgtctcatgtggcggtgacaaaagagaataagaaccaagcgagaggggtttccccttataaaactatcagatcttattcactaccacaagaacagtatgggggaaaccacccgcatgattcagttatctcccaccaagtccctcccaacacatgggaattatggcagctgcaattcaagatgagatttgggtggggacacagccaaaccatatcaccattggtggacatttgtgttgttttcactttgtagttgtcataaattatgctgctgtgaacatttatgtacagatttttgtgggtacatatgttttcagtccccttggatatatagccaggagcggaattgctgggttctggggtaactatgtttaaccttttacagaactaccagactgagttccaaagtggctgcaccatttttacattctcaccaggaatgtgtgagggttccagtttctccacatcctcatcaacacttatcttcctttttttagactgtagacatcctagtggttgtgaagtggtgtctgcttggggttttgattcacatctctctaacgactgataatgttgagcatcttttcatttgctcgttggccatttatcctcttcggggaggtgtctatttaaattcttggcccattttaaaattgggttgtccttttattattgagttgtaagagttctttatgtattctagatatgagtcccttatcagagatttgatttgcaagtattttttccctttctgtgggttgtcttttcactttcctgatgggatcatttgcagtactctaatgattttttaaaacattttcctccagaatttagtcggcgtcttaaggaacgcatgcaccacaatattcctcaccgattcaacgtaggactgaacatgcgagccacaaagtgtgctgtgtgtctggataccgtgcactttggacgccaggcatccaaatgtctcggtaagatcagtagttgtgcatctgtgctgggcacctgtgcatctccagcttaaaaagtctatcaggtggaggtgatttttttctaactcatcatatagtgcattcattttcgagcttcttacttcagtaggaggatgctatttttcccctgttgaagctgtgagtttatatatgtctgcagctcatgactccagcctgctgctcagagtgccttaggctttgctaatttccagcccctttttgtcaggctggtctctccctacctttccgctgactccaactgaaacatgcaaacgtgttctttacacacctgtttgtgggcggtctggattgaagcctggaaaactgggtcaagagcacttggcacttttgttttccctttctgcaggggcctggcaccaggggaagctcaggagactacctgcaagccagggccagactctctgggcccggctggggtagagaagcccaggcgttggctggcagaggaagggaagggtccagggtcagctgagcatgccctcaggttgctcactgttcttccctagaatgtcaggtgatgtgtcaccccaagtgctccacgtgcttgccagccacctgcggcttgcctgctgaatatgccacacacttcaccgaggccttctgccgtgacaaaatgaactccccaggtctccagaccaaggagcccagcagcagcttgcacctggaagggtggatgaaggtgcccaggtaccatgtcagggtggcttgggctggagcaggtgctggcacaagccactctgtccctgatgttttctagggaagtgtcttttctaggaactctgccaccccctcatcctatcctccagccggatgtttcttctgagttcagacatttttcttttccatctttctttccccaggaataacaaacgaggacagcaaggctgggacaggaagtacattgtcctggagggatcaaaagtcctcatttatgacaatgaagccagagaaggtaaattaataattcagggggaaggtcattgcacgtggctaacccaggtctccccagtgctggcgcgaaggctttgttttttggactgccttgcaagccttctacgcttttccatttttgaaacttacaaaccaaatgacttctctaaaggttattggtgcgatactcacatctataggtctcccccctgaagaacccgcagggcgctgccctgaagattccacctgctaatacaccttccgagaacttctgcctcagtcaactaacccataaatccgcatcgtcatcagaaatttgactgtgctactcatctgacacactttatttttttttatcttccctctctgccttctctgcacacctctgtcccttccttgttctcgtgcgcctctctttacacacgtaccctgtctctctctcccttgctgtctctctcgctctctcttctccccttgttcttgttcctgttcttttgtttttctttctgcccttcctctttgcaccaagctggacagaggccggtggaagaatttgagctgtgccttcccgacggggatgtatctattcatggtgccgttggtgcttccgaactcgcaaatacagccaaagcaggtgaggaggagccggaggagccccgccctggaggtgggccgggcttggccaatcagcagggacagaaggggtggtacagggaagattggctctgcaaaggaggcccatcttcctccgctccccgccttggcggtaactgggatttgcgtggtttggtgggcatctttgatctctcaggcccgtccctcccagtgggaacgggggaaatccacacccaatcctgtgctctctgaaatctcctagatgtcccatacatactgaagatggaatctcacccgcacaccacctgctggcccgggagaaccctctacttgctagctcccagcttccctgacaaacagcgctgggtcaccgccttagaatcagttgtcgcaggtgggagagtttctagggaaaaagcagaagctgatgctgtgagtatgaaagcgggccctggaggttgtctttgtaaagggggctgacttggtaactggtgttaacgacgagaatcccattggccattttgattcccctcaggctctctctctgagggctgatggctctagactgtgtcatggccaggagtctggtggtgatgaaggcacaagcaccaaggtagcttgtgtggcatcatgatccatttagaatgtgggaatcagggatgcggtggctcatgcctgtggtcccagtgacccaggaggccaaggcaggaggatcacttgagcccaggagtttgaaaccagactgggcaagatagcaagatcccatctcttaaaaaaagagaaagaaagaaagttagccaggtgtggtgacatgcacctgtagttccagctagtagggaggctgaggccggcggattgcccaggagtttgaggctgcagtgagctacgattgtgccactgtactccagcctgggcaacagagcgaggcatggactgtaaaagcaaaggaaaaagaatgggggaatcggcatcagtagcctactctggtggcattgtagaccttggttgtggtgatgcagcagcaaatgtacttataaggaaatcctctctcctgtttactcaaatgagtttgtctggtttgaaggcttgagttagaagcactttggccacgaagcagcacaataggctgccggcagctgtgtcccctccaggaaggcttttcataagcatctcagttgtttttgcagtatttgctcttccgtaggcaggtttggagtcctacttatccttaagctgttagaaacgtaggtgtgctgtgattggcatcaccccacctaaaatgttccaggatacaaacagtgctcattgctcattgacgtttgctccagcgaagaccaaacagctcttttcagactcttcactcctaataaacactttatgtgttagcaattggcagattcttaaccacaagcctcctgaaaagggctttactcagtggttagacctgtttggatgacttgttggtcgtttcacacgtgagcttttactgaaatccttgttaatatgtgtacaataggcccgcgactgtgtttcttacgagcttctgcctgcctgggttcaggtaaagagatgcagaggcgtgctggctcgctgctaacacggcgcctttgcacttctgctgcagccttatgggggaaggagtctttcatgtgtcttattaaccctgcgcaggtgaaatctccttagcttcagcttatttcttattacagaatagctttccatgtctactaccctcccttatttctgcatcccagccaaattataactcagatgctaattaacagctgccccagagataccaatagcactcgcattttgcatttggagctcagatcaaaatacgggctgagctaagagcatatgtgcgtttctgagcatttccaggaataacttggccttaaccttctcttggtttctctggatggtttggtcataaacagatcagcctcacgatgtcttctgtttttcttttctttcacctatgaaaagaaactgcttggaaactccctgctgaaactggaaggtgatgaccgtctagacatgaactgcacgctgcccttcagtgaccaggtaatgcttgcatgggcacggccagctggtgtctggttacagccacaccccatcaagaaagaaagggctgtggaggccttgttgctcttactagagattgttctggtgacgtgaccgtgcttatgttctgccttcggacttctgcccttgcaggtggtgttggtgggcaccgaggaagggctctacgccctgaatgtcttgaaaaactccctaacccatgtcccaggaattggagcagtcttccaaatttatattatcaaggacctggagaagctactcatgatagcaggtgtgaggccaaggacatggtgttttttctttactttcaagggagccaatatgttgaagccacgtttcatgctcgtaaaacacaaaatagtagagaggagccgttgtagctcttatctctgtgtccccatagatgcccaagcctcagctaatggaccccctctgtccagattcagttcccttccagtatccagtttagcacagtctgacattcccaaagaacatcccactgttaggccaagtgaagagtgctaagcctcgaagactatctaaagccaaaccctttgtcctgattgcaacgaaaccaccgtgggccctgaccttctgagagcttgcttgctctgttaactctgtgatctctctcaagtcaccatttgctaatattttgtcataatttttttctctgtcttcttaacacacacacacacacacacacacacacacacacacacactctctctctctctctctctctctctctctctttcctgaaccatttgagagttagttgcaggtatgacgccaagttcttcagtatatcaacctaaggattgaagacattctgtcacataaccagggtacagtttatttctctctgtctgtgttagtgacattatttttaaaggggaaaagagtaatatatcgattcagtgttcaaaacaacaacagttaggtcttgtttcaggcatggctggatccggggactgacatactatggacaagaactggcctttcttaatctcagctctttttcctccgtctcttcctctcttccttattttattctttagagcagttttagattcacagcaaaattgaaaggtacagagagttcccatatacccccgttctcatatatgcatagcctcccccactaccaacatcccccaccagagtgatacgttcgttagagtcagtgaacctacattgacacattgacagtgacacatcattgtcaccccaagtctacagtttacattatagagttctttcttggtggtatacattctatgggttttgaaaaacatataatgacatgtatccacacatagagtatcatatagaatagtttcacatactataatttctgcatttaggaaatttacccttactataatacaagtatccgctatgctgcccataattggattttacctgtggcttctataatgtcccagaatttgcattgcatttaatcatgtctctctagtctcctttaatctgaacggttcctcagccttttgtctctcctgacatccacatatttggatagtccaagtctgttttttcatagaatgcctcctcattcctccctcacacattcgttctttactttgctggggagcatgtttgaaagtacagttcacattctccaattttatgtctgcagaattccaccctcctcagaatcttgactaaaaggccaaatgttattgtcttagatttaaatcatggacttgggccgggcgtggtggctcacgcctgtaatctcagcactttgggaggctgaggcgggcagatcacaaggtcaggagtttgagaccagcctgaccaacatggcgaaaccccatctctactaaaaatacaaaaaaaaattagccaggcgtggtagcatgcacctgtaatcccagctactcaggaggctgaggcaggagaattgcttgaacccaggaggcagaggttttagtgagccgagattgtaccattgcactccagtgtgggcaacagagcaagactctgtctcaaaaatttaaaaaaaaaaaataaataaatcatggacctaaaatgtgtttatatggatttgtggaaaactcagatcatctgtgtggcctcttgtgacttttacttgtgactagaactagaaccaccatcccgtacctttacttaacggcttcacactgacgagaggttgttccttttcctgttcaggagaagagcgggcactgtgtcttgtggacgtgaagaaagtgaaacagtccctggcccagtcccacctgcctgcccagcccgacatctcacccaacatttttgaagctgtcaagggctgccacttgtttggggcaggcaaggtaagctcccctcagagtcctagctggtggaatgttctggaaattgacactacctctcttcccacagagctcgttgatttgaccttcaagatagtgtcaacttaaataacaaacagagaggggctctcttgaaagaaaagagattgatttgggaacagggctttgcaatgggaatacacgtgccattgtaaactatgtgggtatctagggagataaaggaagacagaggtttgtaagtgaggattccatagtctttttgaaataattatccttggcttcaaagattaataacaagactgacgcttgtctaaggttggacagatagtcactgggcggatgtccttgcagaagtattttttgtgtaagattgcaatggcctggccgggcgcggtggctcatgcctgtaatcccagcactttgggaggccgaggcaggtggatcacgaggtcaagagatcaagaccatcctggccaacatggtgaaaccctgtctctactaaaaatacaaaaattagctgggcacggtggcgggcgcctgtaatcccagctactcgggaggctgagggaggaaaatgacttgaacccaggaggcggaggttgcagtgagccgagattgcgccaccgcactccagcctggtgacagggaaaaaaaaaacagattgcaatggcctttgtggttttcgtcgagtctcttttttatcaggcacacaagtgtgagaatcctctcttcatggcctcctcctgctctaatgtcagcgttttgttaacattggcagctccattttgattctgacaactttcacaattgtacatcctcaaactaggttaaatttctgttgcctcctttaggcacgtgaaataatttgtgtagccatgaaatttgtacaggttttgaatctaaaataaatgtctgagagcaaaatgggaataaaattaacaaaactagaaggatgatccataatttaaaaataagtgtgtttgcatgtgcgtgtgtatgtctgctgtgtctgtgagagagagatgaaccttaaaaaaaatctaatgtggatctccatgtctgaactagatgaaagtatgtttcattactagaaatttaaaaattcgaatttatgacatttacataacaaagttcatgagaactcaagttaattcatttgtagcttctggcatattgaaaagtggcacataaaatacctttgtttgcttctttagtcaaaaagtcaaaaaataacagatgctggtgaggtcgtggagaaaaaggaacacttatacactgttggtgggagtataaattagttcaaccattgtggaagacagtgtggggatcctcaaagacctaaaaatggaaataccattcaacccagcaatcccattactgggtatatacccaaaggaatataaatcattctattataaagtcacatgcatgtgtatgttcattgcagcctactcataatagcaaagacatggaatccacctaaatgcccatcaatggtagactggataaagaaaatgtggtacatatacaccatggaatattatgcagctctaaaaaagaatgagatcatgtcctttgcaggaacatggatggagctgtaggccattatcctaagcaaactaatgcaggaacagaaaaacaaataccacatgttttcacttataagtgggagctgaatgatgagaacacatggacacatagaggggaacacacacactggggcccgtcagagggtggagggtgggaggagggaggggatcgggaaaaataactaatggatactaggcttaatacgcaggtgatgaaataacctgtacaacaaacccccatgacatgagtttattgatacaacaaacctgcacatgtgcctgtgaacttaaaagttaaagtagaaaataataaaaaagagtgtttgcgggtatatatacatgtacatgtataactttaattaagtctgaatcaggtgtttatagaccccctgaggctactggcgttctgctgttgaaaaccatcgcattttgaccctcagaagagagcacactgcacatttgttcattcagccgctcaatcaacattttttttttttttttttgacacagagtcttgctctgtcacccaggctggagcacagcggcacgatcttggctcactgtagcctctgcctcccggctttaagcgattctccctcttcagcctcccaagtagctgggactacaggcacgcaccatcacagcaggccaatttttgtatttttagtagagacagggtttgaccatgttggccaggctagtctcgaactcctggcctcaagtgatccacccaccttggcctcccaaagtgctgggattacaggcatgagccactgcacctggccaaaatttttttttttttttttttttttttttttttgagacagagtctcactctgtcacccaggctggaatgcagtggtgtgatcttggctcactgcagcctctgcctcccaggttcaagtgattcttctgcctcagcctcctgagtaactgggattacaggcatgcccaccatgcccagctaataaaaattagttttttaaattagaaattattttcattctaatatctgaactgttcaaaaaatgtatggaacatatatgtaaatcataaagcctaataatgtcgtaagcatccacacactcactacccagtccaagaaatagaacattgctaacaatttcccttttcttgtgtgttcctcccttatcccggcccatcttcattctcccactgtaccagctgctgaccttcgtgccaggactaatttgagcagtaagcctcatttggtgaatgataaacatctggttgtagcaggagacgttaaaagggtttcagctgttctagaaaaagagcgttttgatgtagaactctgcacgtgtatgagttcttagctaagaacttttccttttggattgaaattttctctaaatgtgggccgggtgtggtggttcacacttgtaatcccagcactttgggaggccgaggcaggcggatcacttgaggccaggagttcgagaccagcctggccaacatggcaaaaccccatctgtacttaaaatacaaaaattggccaggcatggtggtgcgcacctgtggtcccagctacttgggaggctgaggtgggagaatggcttgaagccgggaggtggaggctgcagtgagccgagatcatgccactgcactccagcctgggcgacagagtgagactccgtctcagaagaaaagaaattttctctaaattcgtttagcagtctctaccacctttcctctcccttccctcattctgtcttctccctcctcacaagggaagtttgtcaaaagattctgtctccagcagaaggcacatgtgtgggaaaggtgtgtggtgtcaggtgcctccctgaggccttctctggatcccaggtaaagccttggttctcgaccaggggtaattctgccttaccaggggacatttggtaatggctggagacatttttgattgtcacacattgaagtgctgcaggcatctagtgggtcaaggccagggatactgctcatatcctgcgatgcccaggacagccctccccccaccacacagaatgatctggtctgaatcatcaatggcgctgagcctgagagcttttcctagttttgccccacagccggtatcacactggtgacagtctttttcttttcttggttgcttttcagattgagaacgggctctgcatctgtgcagccatgcccagcaaagtcgtcattctccgctacaacgaaaacctcagcaaatactgcatccggaaagtaagtcctgggccttgccttggttgaacgtgggaaagccagtcctgctctctcagcgagccagtgtggaaagtgcactgtcctgggacacagcctgtactgggttccttctaccctgcgggcctttagcctggggtgacctctgtcgtcagcgagatccttcctttgtggaggattccccagggccactagtagctgcggtttccctcctgcttttcttctcacatttgcgaactgcctccccatccagcccagtgagttcagccttttgttagaacagaaagttgactgataggaaaaaccagtggaaaaaaaaaagggggggctctttctaagatcctagcagtcccaggtagcacttatcagaatctttctcaaattctagaggtgtctattaatataaccttctgcaataaccagtgctagcagtattttgatatgtaattagggagctccttcttttcggagcagagtgagctgtgatgatgactgcaatatggacgagatgtgtgttagatccttaaatctgcctggcttctggagaatgctgtctgatgtccctacctcggagtgtcccactcctcctaagcctgatatatttctggtgctttcatgattagtctcaaaaatgaaatgaggctgggcatgttggctcaggcctataatcccagcactttgggaggccgaggagggtggatcacttgaggtcaggagtttgagaccagcctggccaacatggtgaaaccctgtctctactaaaaatacaaaaattagccgggcatggtggcgggtgcttgttatctcagctacgtgggaggcagaggcaggagaattgcataaacgtgggaggtggaagttgcagtgaaccgagattgcactaccgcattccagcctgggcaacagagcaagactccatctcaaaaaaaaaaaaaaaaaaaaaagtgaaatgaagggtgaataatatataagggtcattacctgttagagaaactgttccattctgggcagggtggtgttagtttagttggtgtgttcattgggtgcccaccctgtaagggactgaactggctgttttacaagcacctttcaccacagttctgaaaagcagagacagttattcccaattttcaggtaagacaactgaggctggcagaaaatcctcagttacaaagttgaggccagaactgaagtttgattttttttcctagcatttcactatatcgtgcttcctcaaagttttcccatacttagtaggtgaccaagaaatattcagtgatgatgataatgctcactagaatttgaactgttagcttcaggaaaattctcagaaatcattgcttctttatgattcccggccacacattttgaataggtgtgcctggttttttgatgacattaggattggcctaaaaacaactaaaaataatcaggaagcaggtaattaagatgacaataatgatgatcatgatgatgactgcataggtaatataggttcaaactagaaacttagaagctagcaaaaagaaggaaaccaaaaccattgctgctgaccaccactgttaatagttgttgtatttttcctgtatttttttttcctgtgataagaatgttgtattgttcaagatctgtctcttcattggaatgctgtttctttcttttctttctttttttttttgagacagagttttgctcttgtcgcccaggctgtagtgcaatggcactatctcagcccactgcaacctctgcctcccgggtttgagcgattctcctgcctcagcctcctgagtaactgggatcacaggtgcacaccaccacacctggctaattttttgtatttttagtagagacggggtttcaccatgttggctacactggtctcgaactcctgacctcaggtgatccacctgcctcagcctcccaaagtgctgggattacagatgtaagctactgcgcccagcctggaatggtgtttctgaccccacctttttttggctgcagtttgaccttgttttcttagttttgggttgcatggaacaataggaagagaaaacaaatggatcactgttcatcctgagaggcatgaaaggtgaatggggcgtgtgcagtggctcaagcttgtaattctaatgctttgggaggctgaggtgggaggattgcttgagcccagcagtttgaggctgcagtgagctatgatcacaccactgcactctaacctaggtgacagagcgagatcttgtctccaaaaaaaaaaaaagatgaatggctctctatgacaacgtgaacaagcttggtgacaatgttctccagggcttggctagatgctgtaggcagaagcagaacagctgtggaccttggctgccctgtgttacctctcacatccttctcttctgctctcatgtctcaggagatagagacctcagagccctgcagctgtatccacttcaccaattacagtatcctcattggaaccaataaattctacgaaatcgacatgaagcagtacacgctcgagggtaggacccacctccactttcgcacccacccatggctcaggccgcgctgagactcagaactcactcctgaagccccgcttctcgcctgcctttacagaattcctggataagaatgaccattccttggcacctgctgtgtttgccgcctcttccaacagcttccctgtctcaatcgtgcaggtgaacagcgcagggcagcgagaggagtacttgctgtgtttccacggtgagtcgtggctgcgcccactgcccttttgggtcctcatggacactagggacccatgaggggttggaggagggtacatggagctctggggcaggataggtttgactaggggtacagagaatgtccttccagcaccaccaagtccccttggggatgctcctctccatcaccagatactagcgtggtctaactttatcacattctctccaaagagcaggcagttttttcctcatccatcccttgcctttctttctctccctttcctttctcttactctgtcctcatttcgtcctcccctcccttcccctccctttccatccttctatctgtccttttctttgttgcattctttcttttctttctttcttgggtcctcccctccccctccccatcccctccctcccctccccctccccatcccctccctcccctcccccttcccttctttcctgagtctttccgtctttccctgtctgtcctccttcctccggatcgcttcattcccctctctctctgtctctttctctttccctctcctcctcttattcctttccttcttttcacttgagttctctttctttaataaaatttaataaattaaaataaattaaatttaaaaagtccctcatttttaataaagctgagagctggctcagcagagggcctctggttttcacagtcagtcccatctggccaggggtccctgggctctgctcctcattcttccatcaccatgtgtgtcgctgatgcccctgctcttggctgtgctaatgcccacgtgctcttgacaccttgcagaatttggagtgttcgtggattcttacggaagacgtagccgcacagacgatctcaagtggagtcgcttacctttggcctttggtacgtgaggctcagtgtgggggcttctcttttgccagcagctggtgtcctggaaaagaattgcatccgggtgcggtggctcacgcctgtaatcccaacactttgggaggccgaggcgggtggatcatgaggtcaggagtttgagcccagcctgaccaacatggcgaaaccccatttctactaaaaatacaaaaattagccaggcatggtggcatgtgcctgtagtcccagctactcaggaagctgaggcaggagaattgcttgaacccaggaggcggaggttgcagtgagctgagatcacaccactgcactccagcctgggtgacaaagcgagactctgtctcaaaaaaacaacaaaaaaaaccgcaattgcaagtggaaatttttttcttttttggcctaagcactgtgcatgtgaattccattagataccaagtgccatgtgtaacagtcacccggagaactgttcatggaaagattctgaggctcgatgaagagctgcctacgccagattcaccagcccacagtcccagccctgggaaatatttgctaggctctcatgatagaaaggagcccaattcctgtagatttatttcagtcatttccaaaggctgcagagtgtcccatggcatagctgaacacctgttcacttaaccagttctaattaggcaaagcagtaaggccatgcccgttttgtttgtaagtgtaaacaacactacgatgaacatccttgtactaatctttttgcacttgttagatagcaccccctgattataagctcctaaaagtggaactgttggatcaaagactaaacacacatacacatacaagtatgtacatacgtatctgtgtgaatgttctgaaatgccgtcgtggcccagatacccttcgaggctattttgtttctctcttgctgcataacaagccatctgaaagcttagtgacttcaaacaacagcttattattggccccaactccgtggcttgactggacagttctgcttcatgtggtatcagcagggccactgggacaactagaaagcccaagacaggctcacaaacatggcacgcaatgagtgctggccataatgtgggcgcttagctgcggctggtggctggaggccttgttgctttccacgctggcttcttccaagaatatagaagcggaagctggcaagcgtgctcacttccaccacgctctactggttagagcagaccgcagagtcagcccagattcaaggccagggaactgcaccggggcacgcataccagagcccatgactttaaaagtctaataccaagtcttgccacaaggaataatagtgctttttccctttaaggcagaaaatatttccagtcctgtgtgctctagtttcagtgacactgtcatgcagagatagagtattaagaagaccagcaatgtctaaatagctgtgaacccagtcttttttttaaaatagaacccagtcttttttttttttttttttttgagtcggattttcactcttgttgcccaggctgtagggcaatggcacaatctcagctcactgcaacctctacctcccgggttcaagtgattctcctgcctcagcctcccaagtagctgggattacaggcgcctgtcaccatacccggctaattttttctatgtttagtagagacagggtttcaccatgttggccaggctggtcttgaactcctgatctcaggtgatccacccgcctcggcctcccaaagtgctgggattacaggcatgagccaccgcgcccagcccgaacctagtctttttaaaaattgaattctttgaagatgtttacaatcagttttaaaaggtatacaatgaaaagtctcacccagagagtccatctcccaaattctccatcgctattcctccaaagaaaaaaaagctcatatgagtttcttgtccttccagtactttatgcaaatactagcacataaaatatatatattcttttttccagctttttaaaaatcagtaaggcagaatacttcccacatgattctgaaccttgctttttgcactgagcagtgtaccttgggcattctttcatatctgtacaaagagagccttttcatgcatgtttacagctgcacagaattccatagatgtattataatttttttttttttttttgagacagagtctccctctgttgcccaggtcggagtgcagtggtgccatctcagctcactgcaacctctgcctcttgggttcaagtgattctcccgcctcagcctcctgagtagctgggattacaggtgtacaccaccatgcctggctaatttttgtatttttagtagagatggggtttcaccatgtaggccaggctggtctcgaactcctgacttcaggtgatccacctgccttggcctcccaaagtgctgggattacaggcgtgagccaccacgcccagccagatgtattataatgtatttagccaatccctacactgtacacttgagttgttttccatcttctgctgtaacaaaccacacggcagtgaatatcctcgaacatgcatgactgttctggcgcatagatatgtatttgttgggtgagttgctttacacaggattgctgggtcaaagaatgcattgcagtcagattttgattttccctcttttcaccattctttggcccacactgtgcctgcatggtgatcacacagcctacagagaaccctatctgtttgtgacccacttcaactcactcgaagtaattgagatccaggcacgctcctcagcagggtaagcattgtcctcccatgcgtggaaaacttcagctattggggtaggtgttggggccggccgcatgttccttcctaacttgcctagcaatggaggtagcctgcaatgaaggtaactggaactctgggactctgcaggacccctgcccgagcgtacctggacatcccgaacccgcgctacctgggccctgccatttcctcaggagcgatttacttggcgtcctcataccaggataaattaagggtcatttgctgcaagggaaacctcgtgaaggagtccggcactgaacaccaccggggcccgtccacctcccgcaggtaaccagcttctcctcttcctcagtaccaggggcaacgtgcttttctgcaaggcagaaggaagtgatactaaaccagtagaatgtttcccaatcttcactttgttcttaagctcaaaccattcatttgtttgcgatctgcggcactgaaataacacagaccattatgagcatcaggagaattagaaaataccaccttgcaaaagtcagaggggagaggtctgatctttctctcctgggtattttcattggcttggtgagaaatggagcacaaattaggcatttattgctttagcaggtattctgcggtgctagttgttgggcttgtgggggagggagaatggtgaataaagcagatgtagcccctccctgatggcactcacagcccagtgggagagatgctggcaatcagagattaaggcatggaaggatgaggccctggtggggtggttgaaagcctggacgtggaggtgagggaggatttcccatcagatacgaggtgggggcagggagaccagtgaggggtgctcaggcaggagggaaggcaagccatgcctggaggtccagagatgtgaggtcgtgagagcaggtcagggactcctggccagcctcgtgccttccctggaatgcgagacctcctgaacaggattggactcaaacagccattgataaagaagcagttaaataaattaaagtacagccctgggaaggaatgttgtgcaggcatctggggaaaagaatgaagaactcacactgacatggagcaatcgccaagacacatcaaggtacaggagagtatgcagatatgctgccacttgtattaaaaaggaggggaggtggtgcggtggctcacacctgtaatcccagcactttgggaggtgagggctggcagatcacttgagcccaggagttcaagaccagcctgggcaatgtggtaaaaccctatctctacaaaaaatacaaaaattagccaggtgtggtggtgtgtgcctgtaatcccggctactctggaggctgaggtggcggggactgcttgagcccttgaggcggaggttgccgtgagctgagatcacaccactgtactccagcctgggcacagagtgagaccctatctcaaaatcaaaaaaggatgggaagggcacttccagaatttcagagtaaggacctctgataacctgtttctccataaaggcaacgggaccactggcaattatcaaaatcaacttttcagagctctggaaattaaccctagccctctgagtggtctctgtcaaggcagagtcaaaccaaaagagtcaggagcacatgggtatttggcacctctgcttttccagcaagttcctgggatcaaaaccacattgaacaagcatgttccaaaaaaaggcctcttcttaaaaggcattctttttaaattttacttctttttgaattgataatctaaccacagggcacagaattcaaaggataagaaaggtgtacagtacagagcctctcttctgggtctctcttgcctcctaactctcctcactccctctccccaggtccccacctgggaaggaaccaattttttgaagtttttgtgtttccgtttagggatcctttatgccaatacagccagccctctctgtctataggttatgcctctgtagattcaataaaccatggattgaaaatatttgaaaaaataattgtgtttgtactgcacatgttcaagcttttacaaattgtcattattccctaaacaatatagtataacagctatttacagagcatttacattgtattaggtgttataagtaatctagagatgatttaaagtgtacaacaggatgtgtgtaggttatatgcaaatacactccccctactttttttttgggacagggtctctgtcatctaagctggaatgcagtggtaccagctcactgcagcctcgacctctgggctcaggtgatcctcctacctcagcctgatgagtagctgggattacaggtgtgtgccaccacacccagctaatttttgtattttttgtagagatggagttttaccatgttgcccaggctggtctcaaactcctgggctcaagtgatctgcccgccttggcctcccaaagtgctaggtttataggcttgaagcactgtgtctggtcctacaccatttaatataagagatgtgaacatccatagattttggtacccacaggaagtcctggaagcagtcccccaggccaccaagggacaactgtacaaccaaatgtacagtcagatccactgccctgagaatgggtcttttccacggagcgtcgctaggcaggtcagatagcaacagttttctggggatggggctttttggggagcttcaatcctgatctgctccctctagtggctactagactgctggttttcacagctactgtggttccaaggacattggtttcaactcttccacagatctggggagaggggagtgggtatggggcaagttgaatgtcacaaaacattcggttcttgctgagattcctttgtttttcttgcataaacactctttgaattgttgcaggccttttttgcaacatgcttgttcagtgtggttttgatcccaggaacttgctggaaaagcagaggtgccaaatacccacgtgctcctgactcttttggtttgaccctgcctcgagagtggccgcgcaaagggctagggttaatttctagagctctgaaaagttgattttgacaactgccagtgatcttgttgcttttatggagaaacaggttgtgagaggtccttagtctggcattctggaagtgcccttcccctccttgtttatttattttttatttttatttatttattttttttcgaggtagggtctcactctgtgcccaggctggagcacagtggcgtgatctcggctcactgcaacctccgcctcctgggctcaagagagcccccgacttcagcctccccccgagtagctgggactacaggcgcccgccaccacacctggctaatttttgtattttttgtagagacagggttttaccacattgcccaggctggtcttgaactcctgggctcaagcaatttgcctgccctggccccccaaagtgctgggattacaggtgtgagccactacacgcaaccacccctcctttttaatacaagtggcagcatattctgcatactctcctgtaccttgatgtgtcttggcgattgctccgtgtcagtgtgagaagtagttattcattcatttctccccagatgcctgcacaaccttccttatcagggctgtaccttaattggtttaactgcttcttcattaatggctgttcgagttgtctccaatctgttgctgcaataaatgactttctccttacgtcattttacatgctgaggaatctatctgtaggataaattcctagaaaagtgtgggtgaatgggtgatggctgatgtggatttgtaaatctgatggacagtgtggagttttctgccctgaaggcttctcccatttgccatcccaccagctgcgtgtggaagtgggactggcctcgtcttgacacagtgctaggagctagatccagctcgaggtgtaggaagtttgaaaccttggcctgcaaagaaggtctgagattatttaaccccgggaataaatgacctaagataatcttctggattattataaggtgtgtctaccttctaaatagttatgtggactccataccatgtgcccgacataatgtctatggctggggatacagagatgtagaaagcatgttcttatattccaggagcccataatttggtggaagaaccacaactaatattacaaaataccaagatcttgggcaagactgtcctaatgaataatctctcttttgttgatgtataggagttaattaatctgaaatgtttggttagtgtggttttaacctgaggaacttgctgaaaaaccagaagtgccaataattaaatgctcctaactcttggcttggccctgcttcaagagtgactgctcagtgcaccacagtcctcccctgaaaatgtctagatcttttttaagtagttcccaagtcatgccagaaacacattgaaatattgtaattagatttttttcctccgttgcctcactggataggtggccaggcaccttgcttttgagattatatagtctctcaaaggagttgcttactgtgcgatcaaaacagttccagttcctgagaacgaggggcagaaaagtgtttgctttcctgtggcatgtctggaaaatcagtagttggttatctcttggcttatagaatgatcttttggtcgctgacttctttgggcagttgagaatgtagaaggttggctttctgggtctgattcactgcaggcttcgttgccctggtctgtttagcagagcaggaaacgtaactccttgccaaaaaaccataaaattgatgtggtagattatgggtcattaatggataaggagatggaagactgcccacttggcttggaatgacgggtgtgttccttcctcccgttaatctcagctgacgtcctgaatggccttcccttgagcaatccttcttcccctggccagtgagcaccctctcatttgttttatgatagtttcttgtggacacatcttatcatttcttttccattacaagtaggcttaatgtagttctcctactcggaatttatttttttgtttgtcttccagatttcaaagccatatggctagagatgaatataaaccttgatttcaagatgttgaaatctgagttatcttaaatcttactgctgcagagacaggggttctggccttctgagcattcgttgtctgaatctccaaacgttacagttgcatgggaaagcaagagcatggcatgaaactattcactatgaactgagcccttatgaaattatctctgcacaccaacttctctgttatattgtagaggaggaattggcaaactttttctgcacaggtttagatggtaaatattttcggctttgtgagccatatggtctctgtctcagctgctcaaccctgttgtggtcatgcggaagcagctgtaagacaatgcataaccagatgggcatggcttcattccaataaaactgtatttataaaaacaagcatcttccggatttggccctcaagcctgttctagagtctctccttccacaataaacactgtctttgctgtcgcttctcaattatggacgttgacagaagaggttctgatacagttagaccaataattgaagaaagaaatgaacaagttgataaaattatagcctcttccaatgagaaggatttaaatatcaaggattaagatagtcctttgggaaaacacttttcttgttttaatttttagttttagttttttagaagcggggtcttgccatattgcccgggctggtcttgaactcctgggctcaagcaattctccttccttagccttcctaatagctaggactacaggcatgcatcactgtgcccggctttttcaaatatttttgaagagccttctttaggatccactgcaaaagtccaatgtgtccaacgttggtgtcagagcatgttagcagcaattttgttgagacaattagcacaaaacaaatcattctgtgattcatgcttggttcatttttggaatcagcatgtaattgcattgtaatttaaatactaaaaatatctagcataaaataagtttatattccaagataaagcctcaatcaaacaaaatatgttttcaagtaatattcactgtaatttttttcctccattttaagtagggccttttccaagcacaaattatgctgagataatagggaccctagtacttttagagctgatcaagggtgggaaagaattgactcagaaggccacatttcagttctctctgtgtttgtaggtcttactacatcttcagagagggagtttggcccctgggtctgctgaaatcttcatttgaaatatccaggccaggagtgggtggaggattgggttgggttgtacaaaaaggccgcagtgttttcaactgtttggttactaattatcaacctttgaggcctgggacgttttctgagcccgctttactttgtctgccctgctcagtttcctgactctatcaggcctgatccctacacctctcggtcgtcttattgtcatgactgagaaccatccaccttctgagcatctgcatttgcatcaggtgtcagagactcttggaaagccacatgggggcagaggtgaccaaacacgaggcccaggagtgggacagacatggcagttaacagtgatcagtacagggtttctccaaactgcttccttgcactgagggcctttgtgggtccctgacttctgggtcttagtaggctgacctcctagttgatgacttccttctgtgccttctaggctctgggaaatagtaggtcagtaggatattatatggggcttatgacatcaaactggtctttttttttttttttttttttgagacggagtcttgctctgtcacttaggctggagtgcagtggtccgatcttggctcactgcaacctccgcctccccagttcaagcaattctcctgcctcagcctcctgagtagctgggactacaggcacacgccaacacgcccggctaatttttgtatttttagtagagacggggtttcaccatgttggccaggctggcctcgatctcctgacctcgtgatctacctgcctcggcctcccaaagtgctgggattacaggtgtgcgccactgcgcctggcctatcaaactggtctttattggaatcccagctctaccactcattagctcaggcaagtcacctaactcctgtctgtccccattttcttgcctgtacagtgagggtcatgcttgttcatagctcaggagctgctgtgatgatttaatgagataatgagagatggcagatgaagaacttagcacaggcctggcacacagtaggtgctcagtaaatgaaagcctgcactgaggaaggtgggttgtcttttgttgccatctttgctctcttccctgtctttgctaccaaaatcaaatgcaggcaaagtccaaagaactccaggtctaatctcttgataatcagtggtgaggctgggtcaaggagggggttgctcaggtaagaaggaaaatgcccctctggggttgtggcctcgcagctccctacgttcctcttgtgtcgccagcagccccaacaagcgaggcccacccacgtacaacgagcacatcaccaagcgcgtggcctccagcccagcgccgcccgaaggccccagccacccgcgagagccaagcacaccccaccgctaccgcgaggggcggaccgagctgcgcagggacaagtctcctggccgccccctggagcgagagaagtcccccggccggatgctcagcacgcggagagagcggtcccccgggaggctgtttgaagacagcagcaggggccggctgcctgcgggagccgtgaggaccccgctgtcccaggtgaacaaggtgaggcagcattccgaggcctgtgtgtctgttgcggaggccaggagtgacttggggaactgaggcccccacggggccactgttgtttaaaaaaggaactccatgactgtaattcagactttgcgagacacaggaatttaggaagaaaatgtaccttaagaaatagcttcctggccgggcgtggtggctcacgcctgcaatcccagcactttgggaggccgaggcgggtggatcacgaggtcaggaaatcgagaccatcctggctaatgtggtgaaaccccgtctctacgaaaaaaatacaaaaaattagccgggtgtggtggctggtgcctgtagtcccagctacttgggaggctgaggcgggagaatggcgtgaacccggagggcggagcttgcagtgagccgagatcgcgccactgcactccagcctgggtgacagagcgagactctgtcttaaaaaaaaaaaaaaaaaaaaaaaaaaaaagagcttcctaagcaaatggataacgtgtgtgtaattgaaaaggaaaatatgtatgcatgtaactcaaaatataatagctaccaaaaaatgttttcccttctccagaggcaagtggtagcagtttctagagatattctgtgcgtaccagcaaatatatatgtgtgctctccttttgaaacccaaatgatagcatcctatatgaaatgttgcatgcttttttcaaacatagatatagattcacacacatacacacatatgcttttctttttttttttttcttttgagagacagcgtcttgctctgttaccccaggctggagtgcagtggcgtgattatagctcacggcagcctcaaactcctgggctcaagtgatcctctcacttcagcctcctgagtagctgggaatatgggctgtagctaccatgtctggctaactttttcccccactttttgtttgtttgtttgtttgtttgttttgttttgttttagagacagggtcttactatgttgcccaggctggagtgcagtggtgtgatcatagctcaccacggccttgaacttctgggctcaagtgatcctccagcctcagcctcctgaatagctgcgactacaggctcaagccaccatctgtctgattcccacccccacccccggccctttttattttttttagagacataatgtcgctatgttgcccaggctggtcttgaactcctgggctcaagcaatcctcccaccttggcctcccaaaatgctgggattacaggcgtgagtcaccacgctcagcccacacatgtgtatatataaattgtttttctggaaggctacacagaaagtgttcacagtggttgccttccagaagaactttgaacttttggaaatgtttaaatcatgtgcatgaatgatctgtgtaattttaggtttgcgatcgaggagagggatgggtgtggaagaccaggggctcccccaggcagggcatggctcaagtgcttggtgcctccttagcaggctaagcaggtcaaggagccacctttctgccatttggggctgattttctgggtggcattctccttctgatgccacctgcagttcacctgctggtaaagaaagaaggaaacaccatccatatggcttcttatccctcccaattgaccgatgaaactgtgtatgtgcatgtgtgtgtatcacatgcttacagcatcgcaggtacacacacggctttgggattttccagtgagtttcactccctggcttccccaggctctggagcgggtgctgccctgccaagcactcactgctagctgctgaaggggatagcccaggggctgcagattcccatttgcatcatgcaaggtgagcacagcaacttctggcctcggatggctaacactcctccttatttcactcctaggtctgggaccagtcttcagtataaatctcagccagaaaaaccaactcctcatcttgatctgcaggaaaacaccaaacacactatggaactctgctgatggggacccaagcgcccacgtgctcagccaccctctggctcagcggggcccagacccacctcggcacggacacccctgtctccaggaggggcaggtggctgaggctcttcggagctgtcagcgcccggtgcctgccctgggcacctccctgcagtcatctctttgcactttgttactctttcaaagcattcacaaacttttgtacctagctctagcctgtaccagttagttcatcaaaggaaaccaaccgggatgctaactacaacatggttagaatcctaattagctactttaagatcctaggattggttggtttttcttttttttttctctttgtttctttccttttttttttttttttttaagacaacagaattcttaatagatttgaatagcgacgtatttcctgttgtagtcatttttagctcgaccacatcatcaggtctttgccaccgaggcatagtgtagaacagtcccggtcagttggccaacctcccgcagccaagtaggttcatccttgttcctgttcattctcatagatggccctgctttccccagggtgacatcgtagccaaatgtttactgttttcattgccttttatggccttgacgacttcccctcccaccagctgagaatgtatggaggtcatcggggcctcagctcggaggcagtgacttggggccaagggacctcgagacgctttccttccccaccccccagcgtcatctccccagcctgctgttcccgctttccatatagctttggccaggaaagcatgcaatagacttgctcggagcccagcactcctgggtctcggggtcggggaggggacgggggcacccacttccttgtctgtgacggcgtgttgttccccactctgggatggggaagaggcccgtcgggagttctgcatggcagttcactgcatgtgctgcccccttgggttgctctgccaatgtattaataccatcccatagctcctgccaaatcgagaccctctgacgacttgccgactaactggccaccacaagctgcagtctgtagcactgaacaaacaaaaaacaaaacgctcaagccttacgaccagagaaggatttcagcaaaccaccacctcccactcagtgtcccctccaaacttcacacttccctgcctgcagaggatgactctgttcacacccaatccagcgcggttctaccccacgaaactgtgactttccaaatgagcctttccctagggctagacctaagaccaggaagtttgagaaagcagccgcagctcaactcttccagctccgccagggttgggaagtccttaggtgcagtgcggctcccactgggtctgcggaccctcctattagagtacgaaattcctggcaactggtacagaaccaacctagaggctttgcagttggcaagctaactcgcggccttatttctgcctttaatctcccacaaggcatctgttgctttgggtcctccacgactcttaggcccgcctcaacaacccaggcacctcctaggtaggctcaaaggtagacccgtttccaccgcagcaggtgaacatgaccgtgttttcaactgtgtccacagttcagatccctttccagattgcaacctggcctgcatcccagctccttcctgctcgtgtcttaacctaagtgctttcttgtttgaaacgcctacaaacctccatgtggtagctcctttggcaaatgtcctgctgtggcgttttatgtgttgcttggagtctgtggggtcgtactccctcccctcccgtccccagggcagatttgattgaatgtttgctgaagttttgtctcttggtccacagtatttggaaaggtcactgaaaatgggtctttcagtcttggcatttcatttaggatctccatgagaaatgggcttcttgagccctgaaaatgtatattgtgtgtctcatctgtgaactgctttctgctatatagaactagctcaaaagactgtacatatttacaagaaactttatattcgtaaaaaaaaaaagaggaaattgaattggtttctacttttttattgtaaaaggtgcatttttcaacacttacttttggtttcaatggtggtagttgtggacagccatcttcactggagggtggggagctccgtgtgaccaccaagatgccagcaggatataccgtaacacgaaattgctgtcaaaagcttattagcatcaatcaagattctaggtctccaaaagtacaggctttttcttcattaccttttttattcagaacgaggaagagaacacaaggaatgattcaagatccaccttgagaggaatgaactttgttgttgaacaattagtgaaataaagcaatgatctaaactaatgtgtgctttagtgcaatgacctcttctttttttgagagactgtgaaagaaaaactatcaccagcgtgtcagtgtaggtgtattatcatggatgggaccttctttacgttgtggggagggttttcctctggagtgggatagaggaagccacgtggtggttagggcacactgctatcctggaattaagcgattggtgacattctctgccaagagtttgactgtggaaatttggtcaatacttccagtgaaccatgaactggctattaaggtcattttataggactgcagagctggaaagctcttcaagcagtcacacaggacatttggaaaggattactgaagaatggattacccagttctataatcagctaaccaggaacaggtcagctcaagatatctttcatctattaaaaggccaactacaatttaataatgtagatttctttgtagagaagaattcaaatcaaaggtaattaaaaatgaaaatacttccatttttaagtagaggaacttttacagtctgcaagataaattttttctcattctttagtttgttagtataaacttgctcgatccagacaaacgggttttggcaaatggtgatgtttttgttttcatggttcctgtgggttgtagtctttgaatttttattttctaatgaagtcgtctgaccacggtcaaaattggactcgcagagtcgtatctgtctttgttgcttgtgatgggaaccacagatgcaattctgttcttttcgatgttactgttgggcatgaaaatctgccacaaggtcgtagttgtaagaatgaaaataattcagaagatgaagtggtgaaatgtgaacctttctttccttgtagcattagaaaaacatctgttaaatatcaaccaagcatttcagtgattgtctagaggattgtgggaggtcacagaaaacttccaaagctaagtcaacatagtttggtttcaaaaggaagtgccaaggaagagtgtttgaaccctaaggaatagcccgaaagaaacaaccaaccaattccacagccacaccgtaaaatgaggcctaactcttcatgctggccactcctgtttcataagcacaaaattagatgtcatgttttctgcgcttacaacttaattgtcaccggactaaagaggttgattgcatagcaaattccataaccatggaactttaggatttggagggttaggccaaaagagaatttgcttaataggactgtcttcagaattggacctcttgaatgtgatttgctatagaaagcattcgtgggggccagctcagattccattctcagaatacagtggttacactggcttgttccactggttctaagccatggggagattttgcttccctcctcccagaggacatttgacaatgtctggagacatttttggttgtcacaactcgggagtactactggtatccaatgggtggaggtcagagatgctgctcaacatcctacaaggcaaaggacagccccccactgtaaagcattatctggcccaaagcctcaatagtgccaaggttgagaaaccgtggtctgttctagttttagtcccatgtcttccttggcaatttaaatactgctaatgatgtctaaagcatgtagaccgtggctctaggcctacagtgttaaatgagaaaaatagtttcttatttgcccactcaaatgctgaagctgtttcctgaagctggggagggtgggggtagtggaaatagagtccagtgttgatcactttgttttcccttgagtctgttaatgatgaacggaactctatttgccctagagagattgttagaggtagatgaaagaaccttgaaaatgactttattactctgcataagtcaggctgtctttcagagagccacaaaaaaggaaacaaaaaatcgaccaagggtatacacatcttggcctgttctcactggccactgagtatttcagatgggatgggtgaattcttttagggggaggtagcagtaagagctggcatcctcatctggggaaaggctctttagttgtatgaaagacaagacgacaatgtagttgtgggagcccaccctgagggcagagcctggtggctcgttctagagccagtggctggggtcccagagacggggctccggctgctgctccagcttttgggatcttctccaaatgtctgactcactatagtgacgatgactcttaggaggatcctgtggatgtttttacaattaatagggatgactggggttttagaagaaatgtatacgtatctacaacttccatgttttctcctgaagacaattatagttggcataccagggcagaaggctctagtttgtttctccactaatttgctggccaagatgagtgctgaagcttttattcctcagaaactttatgatttgatgagtggtccatgtcttgggtcttcatcaattcattcaaaccatttgtaaacattggtggatgtcttagcccatttagtgctgctttaacaaaatacctgagaatgggtaatttataaagaacaaaaattcattctctcacagttctggaggctgggaagtccaagattaaggcatgggcaggtttgcttgtctagtgagggctactctctgcttcccagatggcgccttgtgcttgggtcctctgcaggggagaaaagctgtgtgtcctcacatggcagaaggtgccagggcacatgagctgaatgctgcctgaagcctctttgataagaacctcaatttcattcatgagaggaggggctctcatgacctaatctcttcttaaaggccctacctcttaatactatcacattggggacatttgaattttgaaggtgacacaatagcagaggaggatcagatatgggaagtaaatgcttgaaagtgaaactgtgctcatacaaaaggaactgaattaaaatgaaattttgttctttcctagactggctcgttcagtctctgacctcagccacagatcgtatcatgatgttccaggttttttctctcagtcttttaggagccttggagatttcctaattgagctagctgaggtgcaggcacaattttcttgtctggccttttgacttcctgtttgtggccttagccctgcaatactgatttacattttagtaattttttaggctttaatttggctctataaattcatctgtatatcagcttctagagggaaaaatgtatcttcattgaaaagcaatttgagttaagctttaactaagtcctcacccataaaggaaatgctaatgaagaaaggattacttggtcataggacacgatttgacatatggctttgcccctgtgatttgggcaaaacaaggtctccttttccacctttgtaaaatcaccattaacctttagcttcttgggtatggaggctttcacttggtgggcaggctttccgactataatgtgctttttaaagaaaatgaaatcctttgaatacgcacagagatgtgttgtctctgaccatgtcctcttgttttgtgtctcctccatcatctcagcagtgacctcacctggaagtcccctgtggccccagggcttggagaactcatggggtgactggctccagtaaaccagtcttattttacatagcattttcagcttgggttttctgcaccagtgggtagagctcattagcatgcttttctgctaaatttaaaatgtttcctgatacctgagaaggcttaaaggaacacccataaccttccacctttttggaggagggacacggcctcttttagtggatgaaaacagctctgactccacaacgtcctgctctctcacacgccagggtcacgatcccaggctgtcccaccgggcttgtttaggagcaaaaggaaacaaaccctctggcctggggacaccaacaactggccgaagccaggagcctctgctgttacccctcttcagcttccccttgtgacttgagctgttcagaggggctcagttttaggggtcccttaaggttccaaactgtgtgaatgggtgtgagtcacaggactggttctcaggcctgggcagctggagtagccctgtccgctcagagccacaagaacggtactgaaacgcaactctcgaagagttccagtctcttctccaagggactgaataaaatcagagctcctccaggcacatgtccaattatttttacaaagttttattgaaacttgtccatcaaggtgacagtaattcactgttttgaaaagtcacaaaaaagggtacccccaaactcaggtataccaagtaaatactggaacccagggagctcactcctccctctcccaccaggagcaaagggcataacgggagcttccgctgactcacagcaacctgggctagtgggtacatctgtggcgactcccgggaaactgagctgcgtataaagaagtctgctttggtccaaaggacatcttcctgacccagactcagaaggctgctgtcaagttctacattcctttcagaataagcaacagcaactgctgcagtcttgctaactaggggcagaggtcctgagcaaggtgccacgggaccttgtaaaatcacgctgtgtgattttatagggaagagggcagagtgcctctcaagttttcacggttaacactgtcacctattatgactggaataaaaagctggacaacctgccagctaactggtcagtcctgaggatcatccagctgaatggagaaatccggcagcaggttgaaaagtctgttctgagaacagattattgctgagcagagttcatgtgacttctagacgtggtgacttaaaaaatggccttaaggctgcagagccagccacctctgcttacaaaaagagtacttagtgcacatgactgtaagaaacaattgtaaaacctcatctagaaatcagaaagcttctaatttctatagaaatgacacctccctggagccgagagacaatctgttgttgattttgaaggacaggcaagaccaacactgtatttagttccatagccaggcctcaacagggacaagtggctggccttaaaaacacacagatgactggaaatgatgtgtggcctcagtccctgtttcccagaattttactggcaaaggagttagcattcatttttggcttaagaaaaatcgagaatgtaggtttagaactgcacccagcctcatgcaccgcggggccagggctgcagatcctctgccacccctccctcttttcttggacttgatgagtccccgaggctcaaagccatgggggtgctaggaggactgtcacagaccgaggcgctgcaggagctgctctgcctggacaaaccttcaagcaggaccagggcaggtatgaaatgtcttctgaagagtgtgaaatgagcaatgtacagtccattccctcttggggaaagcatgcacgtgtggagcctggtggtgtgctgtctcctgggccaccatccgcccccagctcttcatatgggcttgtataacaaggtggtgacgtacttcttcttgtaccggtgggttgcgctgagcaccatcactccatcctaaggaacaaggtggaaatgatcaaaggctggactaaggggctcaagcctcagaggacatgagaatcattaagggcttcataaaaccacaaattcccgggccagcttcagaa

SEQ ID NO: 919 - DNA, 4299 bp, Homo sapiens
gcaagaagacggagtgatctctacgaatctgagctgagagagtctcggcttgctgctgaagaattcaagcggaaagcgacagaatgtcagcataaactgttgaaggctaaggatcaagggaagcctgaagtgggagaatatgcgaaactggagaagatcaatgctgagcagcagctcaaaattcaggagctccaagagaaactggagaaggctgtaaaagccagcacggaggccaccgagctgctgcagaatatccgccaggcaaaggagcgagccgagagggagctggagaagctgcagaaccgagaggattcttctgaaggcatcagaaagaagctggtggaagctgaggagctcgaagagaaacatcgggaggcccaagtctcagcccagcacctagaagtgcacctgaaacagaaagagcagcactatgaggaaaagattaaagtgttggacaatcagataaagaaagacctggctgacaaggagacactggagaacatgatgcagagacacgaggaggaggcccatgagaagggcaaaattctcagcgaacagaaggcgatgatcaatgctatggattccaagatcagatccctggaacagaggattgtggaactgtctgaagccaataaacttgcagcaaatagcagtctttttacccaaaggaacatgaaggcccaagaagagatgatttctgaactcaggcaacagaaattttacctggagacacaggctgggaagttggaggcccagaaccgaaaactggaggagcagctggagaagatcagccaccaagaccacagtgacaagaatcggctgctggaactggagacaagattgcgggaggtcagtctagagcacgaggagcagaaactggagctcaagcgccagctcacagagctacagctctccctgcaggagcgcgagtcacagttgacagccctgcaggctgcacgggcggccctggagagccagcttcgccaggcgaagacagagctggaagagaccacagcagaagctgaagaggagatccaggcactcacggcacatagagatgaaatccagcgcaaatttgatgctcttcgtaacagctgtactgtaatcacagacctggaggagcagctaaaccagctgaccgaggacaacgctgaactcaacaaccaaaacttctacttgtccaaacaactcgatgaggcttctggcgccaacgacgagattgtacaactgcgaagtgaagtggaccatctccgccgggagatcacggaacgagagatgcagcttaccagccagaagcaaacgatggaggctctgaagaccacgtgcaccatgctggaggaacaggtcatggatttggaggccctaaacgatgagctgctagaaaaagagcggcagtgggaggcctggaggagcgtcctgggtgatgagaaatcccagtttgagtgtcgggttcgagagctgcagaggatgctggacaccgagaaacagagcagggcgagagccgatcagcggatcaccgagtctcgccaggtggtggagctggcagtgaaggagcacaaggctgagattctcgctctgcagcaggctctcaaagagcagaagctgaaggccgagagcctctctgacaagctcaatgacctggagaagaagcatgctatgcttgaaatgaatgcccgaagcttacagcagaagctggagactgaacgagagctcaaacagaggcttctggaagagcaagccaaattacagcagcagatggacctgcagaaaaatcacattttccgtctgactcaaggactgcaagaagctctagatcgggctgatctactgaagacagaaagaagtgacttggagtatcagctggaaaacattcaggttctctattctcatgaaaaggtgaaaatggaaggcactatttctcaacaaaccaaactcattgattttctgcaagccaaaatggaccaacctgctaaaaagaaaaaggttcctctgcagtacaatgagctgaagctggccctggagaaggagaaagctcgctgtgcagagctagaggaagcccttcagaagacccgcatcgagctccggtccgcccgggaggaagctgcccaccgcaaagcaacggaccacccacacccatccacgccagccaccgcgaggcagcagatcgccatgtccgccatcgtgcggtcgccagagcaccagcccagtgccatgagcctgctggccccgccatccagccgcagaaaggagtcttcaactccagaggaatttagtcggcgtcttaaggaacgcatgcaccacaatattcctcaccgattcaacgtaggactgaacatgcgagccacaaagtgtgctgtgtgtctggataccgtgcactttggacgccaggcatccaaatgtctcgaatgtcaggtgatgtgtcaccccaagtgctccacgtgcttgccagccacctgcggcttgcctgctgaatatgccacacacttcaccgaggccttctgccgtgacaaaatgaactccccaggtctccagaccaaggagcccagcagcagcttgcacctggaagggtggatgaaggtgcccaggaataacaaacgaggacagcaaggctgggacaggaagtacattgtcctggagggatcaaaagtcctcatttatgacaatgaagccagagaagctggacagaggccggtggaagaatttgagctgtgccttcccgacggggatgtatctattcatggtgccgttggtgcttccgaactcgcaaatacagccaaagcagatgtcccatacatactgaagatggaatctcacccgcacaccacctgctggcccgggagaaccctctacttgctagctcccagcttccctgacaaacagcgctgggtcaccgccttagaatcagttgtcgcaggtgggagagtttctagggaaaaagcagaagctgatgctaaactgcttggaaactccctgctgaaactggaaggtgatgaccgtctagacatgaactgcacgctgcccttcagtgaccaggtggtgttggtgggcaccgaggaagggctctacgccctgaatgtcttgaaaaactccctaacccatgtcccaggaattggagcagtcttccaaatttatattatcaaggacctggagaagctactcatgatagcaggagaagagcgggcactgtgtcttgtggacgtgaagaaagtgaaacagtccctggcccagtcccacctgcctgcccagcccgacatctcacccaacatttttgaagctgtcaagggctgccacttgtttggggcaggcaagattgagaacgggctctgcatctgtgcagccatgcccagcaaagtcgtcattctccgctacaacgaaaacctcagcaaatactgcatccggaaagagatagagacctcagagccctgcagctgtatccacttcaccaattacagtatcctcattggaaccaataaattctacgaaatcgacatgaagcagtacacgctcgaggaattcctggataagaatgaccattccttggcacctgctgtgtttgccgcctcttccaacagcttccctgtctcaatcgtgcaggtgaacagcgcagggcagcgagaggagtacttgctgtgtttccacgaatttggagtgttcgtggattcttacggaagacgtagccgcacagacgatctcaagtggagtcgcttacctttggcctttgcctacagagaaccctatctgtttgtgacccacttcaactcactcgaagtaattgagatccaggcacgctcctcagcagggacccctgcccgagcgtacctggacatcccgaacccgcgctacctgggccctgccatttcctcaggagcgatttacttggcgtcctcataccaggataaattaagggtcatttgctgcaagggaaacctcgtgaaggagtccggcactgaacaccaccggggcccgtccacctcccgcagcagccccaacaagcgaggcccacccacgtacaacgagcacatcaccaagcgcgtggcctccagcccagcgccgcccgaaggccccagccacccgcgagagccaagcacaccccaccgctaccgcgaggggcggaccgagctgcgcagggacaagtctcctggccgccccctggagcgagagaagtcccccggccggatgctcagcacgcggagagagcggtcccccgggaggctgtttgaagacagcagcaggggccggctgcctgcgggagccgtgaggaccccgctgtcccaggtgaacaaggtgaggcagcattcc

SEQ ID NO: 920 - protein, 1260 aa, Homo sapiens
MMQRHEEEAHEKGKILSEQKAMINAMDSKIRSLEQRIVELSEANKLAANSSLFTQRNMKAQEEMISELRQQKFYLETQAGKLEAQNRKLEEQLEKISHQDHSDKNRLLELETRLREVSLEHEEQKLELKRQLTELQLSLQERESQLTALQAARAALESQLRQAKTELEETTAEAEEEIQALTAHRDEIQRKFDALRNSCTVITDLEEQLNQLTEDNAELNNQNFYLSKQLDEASGANDEIVQLRSEVDHLRREITEREMQLTSQKQTMEALKTTCTMLEEQVMDLEALNDELLEKERQWEAWRSVLGDEKSQFECRVRELQRMLDTEKQSRARADQRITESRQVVELAVKEHKAEILALQQALKEQKLKAESLSDKLNDLEKKHAMLEMNARSLQQKLETERELKQRLLEEQAKLQQQMDLQKNHIFRLTQGLQEALDRADLLKTERSDLEYQLENIQVKHEKVKMEGTISQQTKLIDFLQAKMDQPAKKKKVPLQYNELKLALEKEKARCAELEEALQKTRIELRSAREEAAHRKATDHPHPSTPATARQQIAMSAIVRSPEHQPSAMSLLAPPSSRRKESSTPEEFSRRLKERMHHNIPHRFNVQMRATKCAVCLDTVHFGRQASKCLECQVMCHPKCSTCLPATCGLPAEYATHFTEAFCRDKMNSPGLQTKEPSSSLHLEGWMKVPRNNKRGQQGWDRKYIVLEGSKVLIYDNEAREAGQRPVEEFELCLPDGDVSIHGAVGASELANTAKADVPYILKMESHPHTTCWPGRTLYLLAPSFPDKQRWVTALESVVAGGRVSREKAEADAKLLGNSLLKLEGDDRLDMNCTLPFSDQVVLVGTEEGALNVLKNSLTHVPGIGAVFQIYIIKDLEKLLMIAGEERALCLVDVKKVKQSLAQSHLPAQPDISPNIFEAVKGCHLFGAGKIENGLCICAAMPSKVVILRYNENLSKYCIRKEIETSEPCSCIHFTNYSILIGTNKFYEIDMKQYTLEEFLDKNDHSLAPAVFAASSNSFPVSIVQVNSAGQREEYLLCFHEFGVFVDSYGRRSRTDDLKWSRLPLAFAYREPYLFVTHFNSLEVIEIQARSSAGTPARAYLDIPNPRYLGPAISSGAIYLASSYQDKLRVICCKGNLVKESGTEHHRGPSTSRSSPNKRGPPTYNEHITKRVASSPAPPEGPSHPREPSTPHRYREGRTELRRDKSPGRPLEREKSPGRMLSTRRERSPGRLFEDSSRGRLPAGAVRTPLSQVNKVRQHS

SEQ ID NO: 921 - DNA, 5276 bp, Homo sapiens
tgaatgccaaactcccgattgggaccccagattacatggctcctgaagtgctgactgtgatgaacggggatggaaaaggcacctacggcctggactgtgactggtggtcagtgggcgtgattgcctatgagatgatttatgggagatcccccttcgcagagggaacctctgccagaaccttcaataacattatgaatttccagcggtttttgaaatttccagatgaccccaaagtgagcagtgactttcttgatctgattcaaagcttgttgtgcggccagaaagagagactgaagtttgaaggtctttgctgccatcctttcttctctaaaattgactggaacaacattcgtaactctcctccccccttcgttcccaccctcaagtctgacgatgacacctccaattttgatgaaccagagaagaattcgtgggtttcatcctctccgtgccagctgagcccctcaggcttctcgggtgaagaactgccgtttgtggggttttcgtacagcaaggcactggggattcttggtagatctgagtctgttgtgtcgggtctggactcccctgccaagactagctccatggaaaagaaacttctcatcaaaagcaaagagctacaagactctcaggacaagtgtcacaagatggagcaggaaatgacccggttacatcggagagtgtcagaggtggaggctgtgcttagtcagaaggaggtggagctgaaggcctctgagactcagagatccctcctggagcaggaccttgctacctacatcacagaatgcagtagcttaaagcgaagtttggagcaagcacggatggaggtgtcccaggaggatgacaaagcactgcagcttctccatgatatcagagagcagagccggaagctccaagaaatcaaagagcaggagtaccaggctcaagtggaagaaatgaggttgatgatgaatcagttggaagaggatcttgtctcagcaagaagacggagtgatctctacgaatctgagctgagagagtctcggcttgctgctgaagaattcaagcggaaagcgacagaatgtcagcataaactgttgaaggctaaggatcaagggaagcctgaagtgggagaatatgcgaaactggagaagatcaatgctgagcagcagctcaaaattcaggagctccaagagaaactggagaaggctgtaaaagccagcacggaggccaccgagctgctgcagaatatccgccaggcaaaggagcgagccgagagggagctggagaagctgcagaaccgagaggattcttctgaaggcatcagaaagaagctggtggaagctgaggagctcgaagagaaacatcgggaggcccaagtctcagcccagcacctagaagtgcacctgaaacagaaagagcagcactatgaggaaaagattaaagtgttggacaatcagataaagaaagacctggctgacaaggagacactggagaacatgatgcagagacacgaggaggaggcccatgagaagggcaaaattctcagcgaacagaaggcgatgatcaatgctatggattccaagatcagatccctggaacagaggattgtggaactgtctgaagccaataaacttgcagcaaatagcagtctttttacccaaaggaacatgaaggcccaagaagagatgatttctgaactcaggcaacagaaattttacctggagacacaggctgggaagttggaggcccagaaccgaaaactggaggagcagctggagaagatcagccaccaagaccacagtgacaagaatcggctgctggaactggagacaagattgcgggaggtcagtctagagcacgaggagcagaaactggagctcaagcgccagctcacagagctacagctctccctgcaggagcgcgagtcacagttgacagccctgcaggctgcacgggcggccctggagagccagcttcgccaggcgaagacagagctggaagagaccacagcagaagctgaagaggagatccaggcactcacggcacatagagatgaaatccagcgcaaatttgatgctcttcgtaacagctgtactgtaatcacagacctggaggagcagctaaaccagctgaccgaggacaacgctgaactcaacaaccaaaacttctacttgtccaaacaactcgatgaggcttctggcgccaacgacgagattgtacaactgcgaagtgaagtggaccatctccgccgggagatcacggaacgagagatgcagcttaccagccagaagcaaacgatggaggctctgaagaccacgtgcaccatgctggaggaacaggtcatggatttggaggccctaaacgatgagctgctagaaaaagagcggcagtgggaggcctggaggagcgtcctgggtgatgagaaatcccagtttgagtgtcgggttcgagagctgcagaggatgctggacaccgagaaacagagcagggcgagagccgatcagcggatcaccgagtctcgccaggtggtggagctggcagtgaaggagcacaaggctgagattctcgctctgcagcaggctctcaaagagcagaagctgaaggccgagagcctctctgacaagctcaatgacctggagaagaagcatgctatgcttgaaatgaatgcccgaagcttacagcagaagctggagactgaacgagagctcaaacagaggcttctggaagagcaagccaaattacagcagcagatggacctgcagaaaaatcacattttccgtctgactcaaggactgcaagaagctctagatcgggctgatctactgaagacagaaagaagtgacttggagtatcagctggaaaacattcaggttctctattctcatgaaaaggtgaaaatggaaggcactatttctcaacaaaccaaactcattgattttctgcaagccaaaatggaccaacctgctaaaaagaaaaaggttcctctgcagtacaatgagctgaagctggccctggagaaggagaaagctcgctgtgcagagctagaggaagcccttcagaagacccgcatcgagctccggtccgcccgggaggaagctgcccaccgcaaagcaacggaccacccacacccatccacgccagccaccgcgaggcagcagatcgccatgtccgccatcgtgcggtcgccagagcaccagcccagtgccatgagcctgctggccccgccatccagccgcagaaaggagtcttcaactccagaggaatttagtcggcgtcttaaggaacgcatgcaccacaatattcctcaccgattcaacgtaggactgaacatgcgagccacaaagtgtgctgtgtgtctggataccgtgcactttggacgccaggcatccaaatgtctcgaatgtcaggtgatgtgtcaccccaagtgctccacgtgcttgccagccacctgcggcttgcctgctgaatatgccacacacttcaccgaggccttctgccgtgacaaaatgaactccccaggtctccagaccaaggagcccagcagcagcttgcacctggaagggtggatgaaggtgcccaggaataacaaacgaggacagcaaggctgggacaggaagtacattgtcctggagggatcaaaagtcctcatttatgacaatgaagccagagaagctggacagaggccggtggaagaatttgagctgtgccttcccgacggggatgtatctattcatggtgccgttggtgcttccgaactcgcaaatacagccaaagcagatgtcccatacatactgaagatggaatctcacccgcacaccacctgctggcccgggagaaccctctacttgctagctcccagcttccctgacaaacagcgctgggtcaccgccttagaatcagttgtcgcaggtgggagagtttctagggaaaaagcagaagctgatgctaaactgcttggaaactccctgctgaaactggaaggtgatgaccgtctagacatgaactgcacgctgcccttcagtgaccaggtggtgttggtgggcaccgaggaagggctctacgccctgaatgtcttgaaaaactccctaacccatgtcccaggaattggagcagtcttccaaatttatattatcaaggacctggagaagctactcatgatagcaggagaagagcgggcactgtgtcttgtggacgtgaagaaagtgaaacagtccctggcccagtcccacctgcctgcccagcccgacatctcacccaacatttttgaagctgtcaagggctgccacttgtttggggcaggcaagattgagaacgggctctgcatctgtgcagccatgcccagcaaagtcgtcattctccgctacaacgaaaacctcagcaaatactgcatccggaaagagatagagacctcagagccctgcagctgtatccacttcaccaattacagtatcctcattggaaccaataaattctacgaaatcgacatgaagcagtacacgctcgaggaattcctggataagaatgaccattccttggcacctgctgtgtttgccgcctcttccaacagcttccctgtctcaatcgtgcaggtgaacagcgcagggcagcgagaggagtacttgctgtgtttccacgaatttggagtgttcgtggattcttacggaagacgtagccgcacagacgatctcaagtggagtcgcttacctttggcctttgcctacagagaaccctatctgtttgtgacccacttcaactcactcgaagtaattgagatccaggcacgctcctcagcagggacccctgcccgagcgtacctggacatcccgaacccgcgctacctgggccctgccatttcctcaggagcgatttacttggcgtcctcataccaggataaattaagggtcatttgctgcaagggaaacctcgtgaaggagtccggcactgaacaccaccggggcccgtccacctcccgcagcagccccaacaagcgaggcccacccacgtacaacgagcacatcaccaagcgcgtggcctccagcccagcgccgcccgaaggccccagccacccgcgagagccaagcacaccccaccgctaccgcgaggggcggaccgagctgcgcagggacaagtctcctggccgccccctggagcgagagaagtcccccggccggatgctcagcacgcggagagagcggtcccccgggaggctgtttgaagacagcagcaggggccggctgcctgcgggagccgtgaggaccccgctgtcccaggtgaacaaggtgaggcagcattcc

SEQ ID NO: 922 - protein, 1741 aa, Homo sapiens
MAPEVLTVMNGDGKGTYGLDCDWWSVGVIAYEMIYGRSPFAEGTSARTFNNIMNFQRFLKFPDDPKVSSDFLDLIQSLLCGQKERLKFEGLCCHPFFSKIDWNNIRNSPPPFVPTLKSDDDTSNFDEPEKNSWVSSSPCQLSPSGFSGEELPFVGFSYSKALGILGRSESVVSGLDSPAKTSSMEKKLLIKSKELQDSQDKCHKMEQEMTRLHRRVSEVEAVLSQKEVELKASETQRSLLEQDLATYITECSSLKRSLEQARMEVSQEDDKALQLLHDIREQSRKLQEIKEQEYQAQVEEMRLMMNQLEEDLVSARRRSDLYESELRESRLAAEEFKRKATECQHKLLKAKDQGKPEVGEYAKLEKINAEQQLKIQELQEKLEKAVKASTEATELLQNIRQAKERAERELEKLQNREDSSEGIRKKLVEAEELEEKHREAQVSAQHLEVHLKQKEQHYEEKIKVLDNQIKKDLADKETLENMMQRHEEEAHEKGKILSEQKAMINAMDSKIRSLEQRIVELSEANKLAANSSLFTQRNMKAQEEMISELRQQKFYLETQAGKLEAQNRKLEEQLEKISHQDHSDKNRLLELETRLREVSLEHEEQKLELKRQLTELQLSLQERESQLTALQAARAALESQLRQAKTELEETTAEAEEEIQALTAHRDEIQRKFDALRNSCTVITDLEEQLNQLTEDNAELNNQNFYLSKQLDEASGANDEIVQLRSEVDHLRREITEREMQLTSQKQTMEALKTTCTMLEEQVMDLEALNDELLEKERQWEAWRSVLGDEKSQFECRVRELQRMLDTEKQSRARADQRITESRQVVELAVKEHKAEILALQQALKEQKLKAESLSDKLNDLEKKHAMLEMNARSLQQKLETERELKQRLLEEQAKLQQQMDLQKNHIFRLTQGLQEALDRADLLKTERSDLEYQLENIQVKHEKVKMEGTISQQTKLIDFLQAKMDQPAKKKKVPLQYNELKLALEKEKARCAELEEALQKTRIELRSAREEAAHRKATDHPHPSTPATARQQIAMSAIVRSPEHQPSAMSLLAPPSSRRKESSTPEEFSRRLKERMHHNIPHRFNVQMRATKCAVCLDTVHFGRQASKCLECQVMCHPKCSTCLPATCGLPAEYATHFTEAFCRDKMNSPGLQTKEPSSSLHLEGWMKVPRNNKRGQQGWDRKYIVLEGSKVLIYDNEAREAGQRPVEEFELCLPDGDVSIHGAVGASELANTAKADVPYILKMESHPHTTCWPGRTLYLLAPSFPDKQRWVTALESVVAGGRVSREKAEADAKLLGNSLLKLEGDDRLDMNCTLPFSDQVVLVGTEEGALNVLKNSLTHVPGIGAVFQIYIIKDLEKLLMIAGEERALCLVDVKKVKQSLAQSHLPAQPDISPNIFEAVKGCHLFGAGKIENGLCICAAMPSKVVILRYNENLSKYCIRKEIETSEPCSCIHFTNYSILIGTNKFYEIDMKQYTLEEFLDKNDHSLAPAVFAASSNSFPVSIVQVNSAGQREEYLLCFHEFGVFVDSYGRRSRTDDLKWSRLPLAFAYREPYLFVTHFNSLEVIEIQARSSAGTPARAYLDIPNPRYLGPAISSGAIYLASSYQDKLRVICCKGNLVKESGTEHHRGPSTSRSSPNKRGPPTYNEHITKRVASSPAPPEGPSHPREPSTPHRYREGRTELRRDKSPGRPLEREKSPGRMLSTRRERSPGRLFEDSSRGRLPAGAVRTPLSQVNKVRQHS

SEQ ID NO: 923 - DNA, 334327 bp, Mus musculus
  misc_feature (1)...(334327): n = A, C, G or T/U
tgaccaaatgtaaccccagtgctggggaggcagagaaaaggggtccctggagaaagctggcgagatagactggcaggttggcgaccttacatcaatacataaggtagagagcaagcgaaggggacgtcccttctctactttggacccccatacacaggcagacacatgtgcacatacatgctaatacacatgcgtgcatgcatatcgcacatacatatgcagaaacaaaaaggttgaaccaagactttcttgcctctctgtgtaatgcccacccgctaactcttttttcgtcatttcaggcatctgaagctggtaggcgttccccttaaggttcggaggttacacacagcagtgtgtcactacaggggccggaccggcgctgagcacctgtggctcacgcggcatctaaaggatccgtttgtgaaggccgcaaaggtggagagttaccgctgccgcagtgccttcaaactcctggagatgaatgagaagcatcagatcctgaggcccggtctccgggtgctggactgcggggcagctccgggagcctggagtcaggtggcagtgcagcgcgtcaatgccacaggcgcaggtgggacctgctggactcccagctcctctgactactgctagtgagcagctcttacctagagacattgtttgaggctctttctaagtaggtttagagatgagagttacagaaatacgacacaggctgggtacaggacacagctgctaagtaaagtcaggctcccgcaggcctacgaggtggaggcaggattagaagttcagggtcatcccagctacatggtatgtctgtactagagaaaaaaaaaagggcagaggtagggggttgggaagggagcacagggtggtggtgatgctatgaagatgggttagtcagcagtggttctcactctgggctgtgacccactggcttggtggttgaatggtgcatgccggtaaggctgacaagcttgagttctcgccccaggatttacactgtggacgggagaattgacaccagaaagttgctgtgtggactccacaaatgtgccctggcgtgtgctcacttgcttatataccctctcacatacatgattaaataagcaaaatgtttaaaaaagaacaaagaagaaaaccacaggagttggcggacagcctgggtttgcactatgtccctttctctaaacaaaacaaaaagccccagaaaactaaacaataatggcttcctttgctttctgttgctgtcataagcaccataaccagacagtgtgagtaggaaaaggtttccacctgggctgggggtctgggccctgtaagaaagcaggctcttcgagccaggggaacaggcaggctgtgcgagccaggggagcgggccagtcagcagcaccctccatggcctgtgcatcagcagctcctgcctccaggctccagccttgattgagttcctgttctggcttctttcagtgacagtgatatggatatgtaagtcacgtaacccccttcttctccaacttgatttttggttatggtgtttcatcacagcagtagaaactccaagacagcagggtttggggacaggactactaatgtgtccctgaagcctaggagctcttggaggtcccactggggccactggattccttactctgggaatgtgataggctgtgtactgtgtgtgtatgtgtgtgtgtgtgtgtgtgtgtgtgtgtgtgtgtgaaatggtgcccaaataggaaagagaaaaatcgaaaaaacagctgcatctgtgacattgcccagctgtggtggctatacctgtgaccctagccctctggaggtagagacaggagaaccaggaatcccaggcctgagtcacacagttctcaaagaaccaagagccaaaaatgaagggcttggctctcagagaggactcaagttcagttcccagcacccacatcaggcagcccctagcctccgtgatttcacatccaggccttgaactgggcaggtacctgcacttgagtgcacattcacacatatgtaaataaataatacatctggaagacaaaacagtagagcatggtctcacatgccctttagaggcagaggcatcagttctctgaatttgaggctagcctgggctatatagtgagattgtctcaaggaataaaaagcaaacaaacattaaaaaccaaaaaggattgttgggagctgggtatggtggtgcccacctgtaacctcaggtactcactgggttaagtcaggaacttattatgttttgggctagcctgggctacctactaagattcccattttagaaccaacgcatactaaataaaataaaaaatcatttggaagaagagtccttctgtgggaggggagcctggggtagtgaactgacagtgaagtgggattcagcaccttggctgcggttcacctcggcttgtcactctccacgatggcaaggccatttcctttctaggtctcaacttccccagctatgccagggggagtagaggacaccctacactctactacgtgtctttatttatttacttatttttcaactttgagagacgagatctcacttggtagctcaaactagccttgaacttgtgacagtcctcccgcctcaggctcccaaagtgctgaggttatagcctgtgccattattacatctaactcatgtgccttcataccaaaggtcttttgcgcacatacatgcatgggtgcctgactgccttctgtgacttgttttttggtagggagattcatggtttaataacacattgtgttacttccttagattccagctctcctgtgggctttgtgcttggcgtcgatcttcttcacatattccctttggcgggagcaacttttctatgccctgctgatgtgactgaccccagaactttccagaagattctagaactgcttcccagcaggagagcagatgtgattctgagtgacatggcaccgaatgccactgggatcagagacctcgatcacgataagctcatcagcttgtgccttacccttgtggacatggctgtggacatcctgcatcccggagggacactgctgtgtaaaacctgggccggaagtaaaagccacctgctgcagaagagactgacccaggaattccagagcacaagggtggtgaaaccggaggccagcaggaaagagtcttcggaggtgtacctgttagccacccagtaccgtggggggaagggcaccaggaggccgtgagtctgccctgccattctgggggtgcttccggaggagcgtggattcaagctgccttgtggatatgaccagcaccccaaggcacctctgcttttaaagagataagcaaatattttcaagggccgtgaaaaagtgctaagaatgggcagcgccatggcgcagtgaggaaagggggattgctgctaagcctgacagtctgagtgcagcatccgggaccccagagcagcgagagcgcgtgcacgcacacgcaggctgcacacaatatgaacagatatattggtactgttagtttttggcaatttgtctgggaagaaagaatctgactgtggaattcctccatcggctcacaggctgagccagggagacattgatgagtgactgacgtggcagggcccagccctgtgcgggtgctgccatcccttggcaggtagcctgagttgtatgagaaagcggggtgagcaggactgaggaacaagccagtcatccataccccactccccgtctccagttgctgctgcctccaggttcccaccccgagaacccactttgatttccttcagtgatggactgtggttgggatgagtgaggcaaagaaaccctttccttccaaggcttttaaatgctgaaaacaaagcagtcttctctatcatgattttatttttctggcttttgtttacttgtctgtttgtgaggttgagtgtcactataacccaggctggctatgagcccacagtcctcctgccttgcttcccaagtgctgggatggcaagtgtacactgccacacctggctcacgccatgtttgaagagaatgttaggagagtgaaggatataaaaggaaaaacaaaaaacagacaaactaggcagtggtggcacacgcctttaatcccagcagaggctggaggagctctgtgacttgtgacttaagaggccagcctgggctacagagcgagttccaggacagccagggctacactaaataaataaataaataaatgaaggagggagggagggagggaggnnnnnnnnnnnnnnnnnnnnttgatttgttgggctgggatcaaggctcagcaacagagagcctgtctactgtgtgaaaggtcccaagtatgttctctcgcacccccaaaacaaaaccaaatcgacctggtattcaagggccagggaggtgggaaagaactaaagcaatggaaccctttcgctagactgggagtgttgctcagtgggtagagcacttgcctggcatttatgaagccctgggttcctcccctagcacgccatagaccaggtgaggcaatgcgtgcctgcaatcccagcaaagagaggaggatcaggactttagggtcagcctgagctacagaggacagatgtacctggctctggccttatggaaagtcttcagctcctagacttgtcagttgtgaggagcaggcattgctgtggtgctctctgagcacagcaagtcctctgctgggctgactggtggaaagaggtggaggctgaggtttctagagagggcttgctctccttgtctctggtgaatgctggcaacacctctgttcttcaaacagagacaatccctagagcaattagggggaggcgtgttcagtgtgaatgcatgcctggtctgggggtgctttgttgatatatatatatatgtattttttttttaaagatttatttattatatgtaagtatatgtagttgccttcagacattccagaagagggcgtcagatctcattatggatggttgtgagccaccatgtggttgctgggatttgaactcaggaccttcagaagagcagtcagtgctcttaaccactgagccatctctccagccctgtttttaatgtttttagtggaagaatatactgctatgatacttctgctccaaagcccataaatgtcattgctaaagcacgcagcaagacacttgctcctcggtgaatgtcagccttctttaggaaagaagaggttgcatggttatcatcatctgtgagtgtgtgtgtgtgtgtgtgtgtgtgtgtgtgtgtatgtgtgtatgtgtgtgtgtgtccatgtacccaggttcaagtctcagcactcacatagcagccccaaccattagtaattttagtaattagtcccaggggatccaatgtcctgttctggtcttcatggacactgcactaatgtggtgcacagacaggtacattccagcaaaatacgcacacacataaataactaaacaaaaaccatggacagaagcctgtccttatagacccagagagaggctgtggaagttgagcctgcacctttattgtcagttctttgtgctgtaaaagccccgtttgcactaaccacaggcccactgggcactctgggggaagtgttcccactcgagcctgggtaaaaatggctgctggagttcacaaaggcttttcgtggcaaaaaaacaaaacaaaaaccaaacaaacaaacaaaaaaactctgtcacagagtgttttaaacaggacagttgaagcgaaattcacaagttggcaccaagtggtacagttgccatgttgcttcctcaatgggtctgtgcagggttcacaacagctggactgctgtggggtgaggtcagccttgctgacagctaaaatgggtgagggctgagggctcctaaaccagaaagtgttgatgcaaagtgtagcatttcagcactttcacatcaaagggtacgagtttattctggagctggaactgaatggctgtggctaagaaatacacatttagtaagtttttatagtaacacaaaaagttctaagtcaaagcacttttctttcttttcttgtttttgtttttgagacagtgtttctgtgtgtagtgctggctgtcttggaactctctctgtagaccaggctggcctcgaactcatacacctgcccttgtttcctgagtgctgggattaaaggcagacacagccgccgccaccaatgcctggctgtcaagcctctttttcaaatacaccagtggaaactgcgtaggtggctacagccaggcagaggaatcggggctacacgctttagctattacccgatgtccacgccttagctattacctgatggcatttatttagcctcttagttgatagatagtaaaggttgccgagctaatgcattcagagaggtttttatctgttaggtcggacacgggcaagtgggcaaaaggaatggctatttaaggaggctgaataatcaaaaataggctctctttaggctctgcatctgcaaccttcccacaatatcgaggctctgatttgtcagtcagcaccgcacaaggttctggagaaagcacaagttctttgtgaaagttctccttaaaagactgttggagctggagagttggctctgggattaagagtacctgttgttcttgcagaggacctgggttcgattcccagcacccacctggaggctaaccacttccgcaagcaccaggcgtacatgtggtacacagacatatgtgcaggcaaagcactcatatgaataaaataaatcttttttaaaaagataaaaaaatttttttaaaaagataaaaaaaataaaaaagattaaaaaaagataaactgttctttttgtttgtttgtttttttgagacagggtctctgtatagccctggctgtcctagaactcacactgtagaccaggctggcctcgaactcagaaatctgcctgcctctgcctcccaaatgctgggaataaaggcctgcgccaccactacctggctaaaataaactgttaagcctaatgtggtggtgcatgtgtttaatctcaaacacttggcaggcagagttccaggagagtcagggctacaacagagaaactgtcttgaaaaccatgaaagccaaccaagcaaccacaaaactagatacaatgttactagagaaaggcttggacaggaagaatgttgctatcccttagggttgacctgcctctgccttgccttccagaggcaagagccccggtgttgcaagacaacagcagaggcgagtatgcacattatcacatacctataatacaagtgatttgggaggccaggacaggatgaacaagagttcaaggccaggcggggcaacttaaagcgactctgccaaattaagataagagaaattctgggaatgctccagccttgcaaacaaacaaaaagcaaggaacaagaaaatcctcagctggggaaagtgatacacttcattagtcctaacaccagggaggcagaggcagggggatctctgtgagttcaaggtcagtctggtctatatagttccccgacaaccagggcttcataatgagactattgaaaacatcaaagccaaccaaacaacaataaaacctcaacccccccccccccatagctaggcacggtggcactttgctgtccctgtgttaagagagtaagtgtcacaggctgggtcccaacaagccagacttggccactcctcctcaataatttcaaagagacaagttgatagcaaatcagaaaaagggactttattcagtgtggcctcactgggaagagggactcaaagctgcatccagggtgtccctaggtcccagtgtcaggggcctagctagggttgaagtcaaaggttgaagagaaggcagaaggaagctgtcttggttgcccagtctcatcagtgtctcagcactaagtctgtcctcaccttcagctgacaaatgaggagttcttcctgcgtctgccccctggggaggctatccttaggaggagtctcgggccctttgattcaatagtctgataaccaatggtcagtagagggccagggccgttttgcctgtgctcagatggctgatgggttgctgtgaggtccgggccaacctaggctacagggtaagactctgtttctcggtttgaacccaaaacacaacattcatctcaaaagggatgagagaaatttttatctttatttgttttgaaagatttatttattttatgtgagtatactgttgctgtcttcagacacattacagacagattacagctggttgtgagccaccatgtggttgtggggaattgaactcagaatctctgggagagcagtcagtgctcttaacggttgagccatctctccagtccattttattattattattattttcttctagatcgggtttctctgtgtagccctggttgtccaggaacttgctttgtagcccaggctgggctcgaactcacagtgatactcttgcctcagcctctgagtgctgggattaaaaacatgtgccactaccaaccaactggagggattgtttattcaagccaaaaatgaatgactatgtcccataaatacagacttaggttaccctatattccacattccagtctggaagcaatgaggaagtttttatagtaacagaacaaagtcatgagtcagggcaccttaaaaatacattggtgggggccaggtggtacactcctttattcttagcacttgggaggcgggcagaggcaggtgggtctctgtaagtttgaggctagccttgagttccaggacagccagggctacacagggaaaccctgtcttaaaaaaaccccaaacaaggggctagagagatggctcagccgttaagagtactgactgctcttccaaaggtcctgagttcaaatcccagcaaccacatggtggctcacaaccatccgtaatgaggtctgactccctcttctggagtgtctgaagacagctatagtgtactcaaatgtattaaataaataaattgtttattatttattaatatcaataaataaaattatttaaaaaacccaaaacaaaaacaaccaaacaaccaaagcaaaccaagccattggtggtgggccagagaaatggctcaggttaagatcaccaggttcagtgctcagcacacacatgttggctcacagacatctaactcccgttccagaggctctgctgacctcatctggtctctatggacatcatgcatgcacatgaaacacccatacacaaaataaaataataaaacataaaaaaccggcctgttggaagatttaagtaggcagttacaccaaagagaaataccagctatatgcttctgatgctgtccgggggattttggttggtagaaaccgggttttaatttattccaagaggtttttattcattagtcacaacacgttagagctgacgcagaggcaggaaagcaacgggtaggaaggaggctaaagacatagcccctagacaaatttcatcaggctctggacccgcaacgtgaaggacttcttcccaggacttctcattcacaaaagaaagaaagtgaaacaagctaaccaatcaaaacagtgcccaaacaaaacaacctgtgtatacaaagtggcaagattcagaggcaacgcaactttccaaaactttgttccctttccgagcgtgcccagcagttgtgcggcaagcctttaattccagggaggcagaggcaggcacgggtggatctttgtgagttcgaggctacacagagaaacattgtctcaaaaacaaaaacaaacaaacctttcctcctgcgcggtgctattccatacattacggcgcaccccggggcagtggaagagcgccctgcgggacaggcagccgggcccagtttggttccgggtcccctggcgggactgcggtttgttctcaggctacgcccgtggagcacatatttaattctttacgggccgttttctcagatctcgcgagaccccggcggaagtctcgcgatatatagacaccggcggagaggagggagatctgagcggctgctgcagcaccgggctcctcaactgaggtaagggacccggtggcgggatctgcgagcgccccaggcgcctcgcgccctgcccgaccgtaacgaggccacgggagggagctgtctgctgccatcgacacgcatgcattctgagtcggtcctgtcgcgcgccttccctttgccgggtcccccgtgtctccctcccggggccgctctggacggtctcccaccccggtgtcccgctgcagagcctggggtggcgggcctggaccgggaccgggacgggggcgggggcggaggggacagcgtggcccactgtgggctgaagggctcccggggttggagtcggttattttgtaggtcccagggatcgaactcaggttgaccagtcttggtggcaagccccggtgagcgctgagtcgcatgtcaggcccactgtgtgtgtgtgtgtgtgtgtgtgtgtgtgtgtgtgtctgtctgtctgtctgtttgtttttggcagtactgttgattgaccaaggaacttatgcattctaccactgagctatgtccccagtccttttaaaaattaattaatcggctaattaattgatttgtgtgtgtttgcatatatataccaggcttcctgtcgaggttggaggataacttaattctcttcttcttccatatgggtcctaaagatggaaccttgcttgtcttgtcttgccctaaagtgcctttacagattgagttgttttcagtccccattctcgcagagcagtacgctaagcagtcacctactctgctgcctcctcagcccaatccttactttttcttcttaatttttattctgtgatggggcttcccaagttttccgggctgatcttgaacttgccaccagcccttgaatttgtctcagccttctgagtacctgggatgacagacctgtgtcaccaagtgctaggttctcaggctgtcccttggctgaaaccagaaagaaggtgtgtgtgtccctgttaactcaggagccatccagagcagctggtgtcctggaaagtctgctgtctggaagttcagggttcttgtggagagggtacaacttgaggtggcgctttagttacctgtgtggtgtcgtggcttctgaaaccgcagcccttcattcttgtgtgttaatggcagagttcttgtgttggtccgaagagggaggacagaaagtgtgtcttggtgagcaaaggcccacttctcccactgtgcctgttgtccacctggccactagcttcgctttgtcatatgtgtaattggggtgcacaccacggttcttgtaagtgggaaattcagaagaaatttctgcaaagttaccccccccacacacacacacccgttttgagattgggtctagctgtatttttaggtttttgtataacccaggctggcccatgacttgtgatcttgcctcagcccctcacatacattcctcttctcaaggacctttctccaactgagaaatgcttagactcctgtactggctggttttgtgtgtcagcttaacacagctggagttatcacagagaaaggagcttcaggtgaggaaatgcctctgtgagatccactgtggggcattttctcaattagtgaccaaggggggagggcccgttgtgggtagtgccatactggactggtggtcttgggttctataagaaagcaagctgagcaagccaggggaagcaagccagtaagtcacattccctccatggcctctgcatcagctcctgcttcctgacctgcttgagttccagtcctgacttcctttagtgatgaacacatgtttggaggtgtaagctgaataaaccctttcctccccaacttgcttcttggtcatgatgttttgtgcaggaatagaaaccctgactaagacaacttctttgctgcagactctctccaacaccttacctggtctttcagtctaacctggcgtgacatatattcagcctctccattctgtccccagtgggttgtgaaggagtttagacagctactgaggcagtgcagactccttccatacagccccactggttcactcactgtcccctgggctgactctaactggaagttgtaggacagctcaggtgacctccaagagaaaggttatggggttactcaactctcaatagaagactgaagaggcttggggtcccctgcctaccaccatcgtggcttctgaacccagggcggtattgttagttgctggcaagtctgggtctacttatctagacttaccagaatattttggacctgtcccagagtcctctgttctagggggaccaggcaatcgtttgtgggttaaaggctagaatgttgcctagtctggatgtgtctgcttttgttgtcctcatgtgtctgaatcccagggtgtcaggtgtcacagtgtgggaatcatttctttcctccctccttgggagtcatgggactcaaactcaggtcagcagggtttgtgggaagcatctttatccactaagccacttccccagccccacaccaggtaacccacagacattaaagttacagacatcccacatagattccatgatcccaaaccgagaagagacccaaccagggtcacagaatcccagccatgtcctctgcctttctgcctgactagatgccatctgtcactgcatgcctctcaaggacctcagtacacctatttcctgagtgtctgcactctgcagtttttcagttctctagctcctggcttcagtctgacagctggatgctgctcattgtccttatccaggcgtcttgtgagagccctgctctccctttgcttggcctccatgcccatgggagggcagcagtcctgccagtgcagcgcatgtgagccccgtgagtcagcgtgtaagtccccacctcacttacttgactccttccctggcccatcccagtccccgatctgaacagagccttcggtttgcccttctctgtccactgactgttctttcagaaagcccatggtgagctgttgctgcctgtctccagctcagctacatagcctcttctggctactatgcacctgtcatgcaggtcccagccttgtcctcccccctgctggggtgggagtgggcatttctatcctgatcattctcaggctcctttccctgggaatatctgctctctgtaacttcactgatgcaggatatttgatcacagtgtgaaccccaagatgtgttctttttttttttaagatttatttattattagaaataaatacactgttgctgtcttcagatgcactagaagagggtgtcagaatctcattacaagtggttgtgaaccaccatgtggttgctgggatttgaactcaagaccttcggaagagcagtcagtgcttttaaccactccagcccccaagatgtgttcttcactggaaaaacctgtttctagttgtggtgtggctcagccctagcacacatctttaatccaagagctttctgcttattgtaaacaggataaaataaagtcaagaggtggaccaagcatccagcgtgaccaggagtgaacataggaaaaaaatcatagagagtaaggggaaatcaggaggagggatagagagacgcacaggaagcagaagggagggacatttcagtgcgagggtttttgaggtggtgtggagaagaactgcctttttcttctggggcatcggctgaggagcaaggtcagctatgtgctttttctgtctttctgagctggcaggctttaccccagcatctggctcctgagtctattggtaaaactaagcatttaagattttgttgaaagcaacccttcccccttgagctgtgtcctgcagttatcagagcattgctctgaaagctcgcccttcagatgtttagatgcacagtgcaaggatctcctcactgctcaccgtggccttcgagcctcctgccatccgaacctcagctgctttctcaatggccgaccctggagatgctcttggtctaccggcctcaagcttgctcactttacttacttacttatttatgtagaggtgggggggtctctcgtaaccttggctgtcctagaattcactatgtagagcagtgctcagaagaaagacatgccccgccacacccaagtcatggagatagagaagagttggggctgaagggctcactgctcccatccagcaaaccaccagctgctccctccagtgtcacactccgtgtcagaagcagatattaaattttcaatacccattgctgggccccatctgtaatgccacagtgtggaagttgtccgtgggctctgtcagcctcccccacctcaccctcccgtaggtgctctcctaataaacccatgctactgttcctgcctgcgccttgtcttgtttcttcaccccatacaccctgacttaacaggcagccagctcagccaggtattgggccgtaatgagggcttcacacaagcagagcaaatgcactgtgtgccacctttttgagaccaggtctcactaagttgccaagtcgggccttgaacttgtgctcatgcctcctgagtgtctgggatgacagacctgtggcaccaggttttactcctccagctatgacttggctgggggccaaaagacagtgttcactgactctcagcctacagactaggcagagtgcttgccaagtctgtccctcacccttcccatctgagtcaaagggtggttctgctgaaagggtgaggtttgaatccgtgctttatgtggctctggagcagcctgactcttggaggttgaacgcagtctcaggctagcctgggctggatagcaaaaccaagtcttaaaaagaaaagaggggcccaccatggtggtgcgtgcctttaagtctaggcactctgtgagtttgaggccagcctgtcttacatagtgagttccaagccaactaggtttgtggcctgagagcttatattaatacaaaacaaaaacccacaaacaagatactaaaaaaagttaagacccaaagtacccaatatgtaagaagcctgggttggcccacgtgctgtggactgagccagcgtgtgtaaacgccagcagatggagtctccccttgagaggcagtagtggcacccccagcattggccctctgactcctttacaaggtccaggtgggtttatgggcaagtaaagtgaggctttgtgagggtgctaggaacctgcaggaccctctgtgtgtgcgacccagctgagggcagtgggcagcactgctggtaacagcattgctggggccacagttgtctgactgtttcatgcttgtttctgacccccagaggccacatttgccatgagtgtgactttggggtggggagtgcccttgggcctctgagcacctcctctcaggacctggaatgtctgatgctcagtcagtagtctggagctgaagatttctagtatgaacgtttcacgatctttctctctgtctgtctgtctctctttgtatgtatctgtgtgccatggaggttagggaaactgtgttgattcttgttttccattttgttagagacacaatttcttgctctgcggcctgtgagctctggaagattcttttgcctccatcttacaatttgcattaggagggccggcattagagacactcgccaccatgtccaggtttctgggaattcaagcttaagcctttttcttgtaggcacatgggtgccctggtgtgagtgaaggacagtggtgctgcccatctgtgggctccttggttggagctcagtcattgggcttcatcgagtttacccctgagccaactcactcacctggcttctaagtttacttttatttctgattgtgtgcatgtctgtgtgtgcgtgcttcgggaggccagaggtcgccggatgccctggaactggaattgcaggcagttattagcctggtgtagatgctgggaactgtaagaacaggaaacattctaagcaatgagctccctttttattccctcagcactttctggatgggatctttctgtgcagtcctggctgacctggaactttctttgtactgtgtagaccaggctggccttgaatgctcagagctcttcctgcctctgtgtgagtactgacattaatggctatgtcatgccccaccccttttttcaagcagggtctcatgttgctcaagctagcctcgaactcatgtagctgaggctggccttgaacttctcccttgatcctcctgcctctacctgctgatatcataggcatgttgtgtggtgtgctttgggcctcatttcctctccacaatgctggcagtattggcttcatgttaatgttgaaaacctgatcgtttactccataagggtgttagtgggtgggctgtgccagcagacagcacatgggaaggctgcctctgacctttgctctgtcttctagaaggaggctgaccatggaagacctcggggagaacaccacagtcctctcctccctgagatctctgaacaacttcatttctcagcgaatggagggaacatcaggcctggatgtgtccacgtctgcctcagggtccctacagaagcagtatgagtatcacatgcaggtgagtggccctctgtgtgtctgggaatacacttggcttggaggccagatgaatgtcctgcagactcctggaggcatttatcaacttgagcagtagctagagaccagggccgggcagacggttactgtgatttgtagtcttatttcactctgttctaattcctggtagtgttcctagggatatagttccagaggggccagggctcctgaaagaagggtttcccagaagtggcagccgtagctgcagttggggttagggctttgggccgaggagagcagttgccttgcctggtcctcttggcacacagtgaccgtgcatgcacgatgccccaggcatctttgctcactctttcctgtccctcgtctgctctgctgcggctgctctgtgatgaggcgggagcagactggacagtgcctgtgagacattcgttgttgactgtcccagcagtacccacactcagctttttggtggcaggcattgtctttccttgtgagtaggtcttttatgacagtcttctgttgttaagtcctcctctccgccacccctttcttggtaacactcggtattgaacccagggctgcacttgctgaacagtcactctccctctgaggttcatcttcagctttattttatttgaaaacatgtttttagatttgttttactttatttgagttagtgttttgcctgcctgcatgtatgtctatatcattcctggctcctctctaatagcagcaagttccttcactactgagccatctctccagctcctgcatcctcggcttgaagccactattttctgaagcgatgttgccaatagatggtagttgtgtctgagtgctagtgaaataagaaggggttactgtgttcttaaaaaatactccctcttgaaaaaccaaaagccatccccttcctctccttccctccctccctccctccctccctcgctccctccctccctctcttcctccctccttgcctgcctgcctccctccttccctccctccctccctcctttccacaactgaaccatgggccttggatacaggaggcagccctccatccctgtagtgcatctccagcaccatccttactctttattttgagaccagtttcattaaattgttgaggttagccttgaagttactgtgtcctgggctgacctggtccctgtgatccgtcctcatgcctcagcctgaggtggcagacacacactcccacccacaatgcatttcatgacgcctcagcttgtggttcagtaggaggaagatgtggagcaggctgtctgaggtcccgggtgctctgtggtgctgctcccccaggctgggtgtctcttctgtaaaagcttcagcctgctgagacccaggacagagctgggtgtggtacaccttgggagatagaggcagaagcgttgtgagtttgaggtcagctaggctgcagagcaggactgtgccggtgaagccaaacatggactgtgaagggacttcaccctcccatcagcaggtaggtgtggaaatgagaacaagggcagcactttgtgggctagggagatgactctgggtgacgtgctggcttcacagacatgaggacctgagttcagattcccagctcccttgtgaacatctggcatggtcacatgtctgaagcccacttctcagagggggcagcaagtacagacaggaggaccctggagctcactggtcagtctaatggaatggatgagctctgcgtccagtgaggaccttaagaaaataaggtgggggtgatcaaggaaaatgcccagattgacctccaacctccaggtgtacatgcccactcgtgtgagcacatacatacaccacaagtgcatatgtaccccagatgcacgggtggagggatggagaaggctgggcatcaggcatagcaggctgggtagtttgtagtgtgtgggatccgtagcaggagccctggcttctacccattaggtgtcagttgcatatacacctcttagtggcaactggagtgtttcagagtcacaacatttccctctctagggagccactgcctgagtctgaaattctggtttaaagtgtgtatgagtgctcctaggatgtgtctagacaaaatgttgctttagtgagtgagtgcgtcctgaggatctgtgagcacccagggcgtgctgtggagtgggccataaggctcccgtggacagtcccatgtcactccaggacagccagtggcacttcctctagggttctttgagactgactgactcttgcttaggcactcctctggcagttgaggttttttggctctccagttctggacttccagcagacactgttgtctgtcttctgcttgtctgggcattagctaagtgttgtagtggactgagcaggtgtgccaggtctctagccagccttctgatcaggggagtctctggattgactcagtgacagagtttgtgggcttggaggtgcaagcctgtcatcccagaacttgggaatcgaggcaggaggatcccagcaagttctagaacttgccagaactacagagtgagaccttgtctccaaaaaaaaaaaatcaaaactaaaagttaatcatggtatggtggcacaagcctatcacccaactacccatagagacaagggtagagacaagatgatcaggagttcaaggccatccatgactacatggtaagtttgaggccaaccctagttttgaaagactaagtcagctgatggtggtggtacatgccttcaactcagctcctgtaacctcagctactccagctattccagctacttcagctactttggaggatcccaaattcaaggcttgccttggcaacttggtgaaaccatgtctctaaacagcaactacaacaacaggctggtgtggctcagtgggagagtccttgcctcctatgtgtgaggcaggttcagggttccatcctctaaggaaaagacacacacacacacaccacaaggcggggtgtgtgtgtgtctgggtctaagcctcaaactcaaagcaggagagagagaggccacagtaagggacatggccacaatcatccctggttgacatctcagcagggaagtggacctctgtcctccctcagtggggtttccagagtgaggctttccaggtgttgtcctgggttgtgcagaaatacaggctcaagctcccagtaacacaagctatggggaaacaaatacacccaagaacaagcttagaacaagctcacatgtgtcactttccaagccatcttcctttttcttcttgcccttcatgtgtgcacatatggaggccagaggttggcattgtatgtctttctccattgctctctgctgttttgagatggggtctttcgctgaacctggagcttgccagttcagctgggctacctgggctagtgagccctcagctccttacctccacctttctagtgctgggattacagatgctcacagctgcacctggctttctctttcttccaattttttgtttgtttttagagacagcatctctattatatagctgtcctggaactcaagatccacctgcctctgcctcctaggtgcatgccaggtctgtgggtctttcttttgtgtgggtgatgaggatctgaacttaggtcctcactctcatgcggtgtcttagttattttttcttttgctatgataaggttccctgacaagagcagctgaaggaagaaagggtttattctgctgacacttaagggtagagaggccaaggcagcagggtctggaagcagctggtcacatcccatccacaccagggagagagggatgagtgtatgctgctggtcagcccgctctccacttacacagtctagcatcccagacagggagtggtacagtcttcccgcttcaattcaagatgctccacagacatgctcagaggcccatcttccagctcacaatagatcctgtcatgttgacaattagcacattgcaccctgttccttttcatatgtcttgctgcctcccacacatttccaagtaggaactcaagcttttgacagtgccttgctgggacaggtgcttgggcagtgtgcacaggttcagacatttgcccacctaccttcttccttccattcttcctccctcccttagttgttttttgagacagggtcttgctatgcagcagtcctcttgcctcagcctcccgcatgttgcccttgcaggttgtcacttgccttatttgacatggctactgaaccctctcttttctctttgggtaccaactgctcagctggaggaaagagcagagcagatccgctcaaagtcctacctcatccaagtggagcgggagaagatgcagatggagctgagccacaagagagcccgagtggagctggagagagcagccagcaccaatgccaggaactacgaggtgggtccagcccagggggcagagggctgtgtgccacacttgtcagaccaccaaactgggacccagctgctgtggtcagaggccccaggcattcttctgtggccacctaacactagcaggttggagaagggtggcctgctatagggatgtctgcagagtggactctttgctgtgtcgtttgctcagtggtcctgtggtgtgggcagacctgcctctgactggcttcagtcatcctgtggtgtgggcagacctgcctctgactggcctgtttcctctttgcttcagaagaattgtagtgctgtggaagaaatattaggtgctggagtaggggtggggtgacaggctcaggaaatctcaggcttgcagagagtcttggggtctatgttgtattctaccagagcctcattttgtaatggtcctgggcaactcagcggtgcaaccctgggacttgggggacattcagtgcaggaaactgtaattcactatttatgtgtgtgttggtgtggatgtatgtgcaaagggcataggggaaccttggtgtcatccttaggaatgctacccatctccttggagacagggactctcatatggtgtaggccagtgagccttagggatccccctttctctgcctcccacagcagagatgaaatgcacaccccattatactcttcactttttacatgggttctggggatgaacctgaggtcctcaggcttgcccagcaagcactactgacggagccatcgtcccagcccttgcttcagattcattactggctttgctggcgctttctaggactctgatgggtatgtgagtgtcactgtgactcaggctgtgcatcagacctcagagtttgtaaccttccttccttccctgtgatgccatctcccctgttcttgtctgatgtgcctatcataacttttcctgtccttgtgggaatggctggcctcttccctggtgtgctgctggttgggcagatttaagtctgagttgtagagtcctggccctagtgtactgtcccggcttgtctctctgttagggttctgcctgcctgcctgcctgcctgcctgcctgcctgcctgcctgccttccttccttccttccttnnnnnnnnnnnnnnnnnnnnnnnnnnnnnnnnnnnnnnnnnnnnnnnnnnnnnnnnnnnnnnnnnnnnnnnnnnnnnnnnnnnnnnnnnnnnnnnnnnnnnnnnnnnnnnnnnnnnnnnnnnnnnnnnnnnnnnnnnnnnnnnnnnnnnnnnnnnnnnnnnnnnnnnnnnnnnnnnnnnnnnnnnnnnnnnnnnnnnnnnnnnnnnnnnnnnnnnnnntgacagagtaccagacaaaggtaaagttaggaatggcttattctggctcacaagggtgcagtctgtcatgtcagggaaggcacggcagcaggatccttaggcggctggtcacgtcgcatccacagtcaggaagtagaggaggtggatgctggggctcagtacttttttctttttatttagtctgagacccagactgggaccagactgcctgtttcagggtgggtctttcttcctcaggtaaagctctgtggaaacatcttcatagacatccctgagggtgtgtcttctaggacagtcaaaatctcgctatttgacagtcaaaattaaccgtaacgagtagatctgtggcactctggcctatgtcctgtgctggtggcctggtcctgcctcttaggcagagcttgtttgctgctgtgcatctccagtgtgcagtgctgatgtggcctcatgggcatggaggacacttcagtgagcaagggaaggcttctcctgagggaaagcaggcatcgccgtgatgagagaaagtgaggccttggcccttctgtctctcagaggcttgtcctctgttctgcttagagatgctctaaggggtggggtgagctgtgaggtgctggagatgtcagactgtcccttggagtcttgacatttacagtggcttttctggtatagctcaagtgatggtgggtagattagacaggtcaggtgccccttccaccttgaaatagctacttgggatgaggcgaaaggtcagaagacctgcctgaacaatctccttcctgaattgtgctggcagtaccagtagagtgctctctggctccccagtactctgatacattccccactccccctgacttgtagaggggtcttcctgctgttttaaggctacacttgcagttgctgttctcttgggtccttgggtcctttcaaggtgtggttcagtcttccttcttcctaggggttgcagccccctgtgtgtgcattgagtcttcattggttaggagctgcagcactgttttaggcacaggtgacatctactctcctggagtaggattggctgttgaggttcttggaagctctgagtaggagcttgggtaggtggtgtctgctgaggacagagagtgactgttctcagtcctgtcctgcccaaactcatctggggaagtccaaggaggccgacatagtaatggtagtcatgatgtgactggaccttagtgctgtcctggggattagtgtgctggccctgaaggtgtgtgtgataggcactctggacagtaatggccctgcctgcagctgccatccgtgtccctttcctaactgtagtcatcttctctgtggggagtctcaacgcattttaatgacagcctgagcatggccagacaagatctgctggcgctgcagaagcttcattccaaggtcaagtctgaattgtagattttccatgctttatcttctcttgcaaggagggtggcggtgagcagacagtgtgacgagtgacgagtgtgtagtgcggtccatgccaaatccctcagagtgggagtccccatgctgccgcatcaggagccctggtatccgggtctcctgcctgctcatgcatttgtcctttgtgattgataggcctacctggctcctctgtgcactacactccctgaccaggctcttccttctccacagcgcgaggtagatcgcaaccaggagctcctggcacgcattcgacagctccaggagtgtgaggccacagcagaagagaagatgcgggagcagctggagcgccacaggctgtgcaagcaaaacctggatgctgtcagtcagcagctgcgggaacaggaggacagcctggcttcggccagggaggtgagcgccggcccatgccggccggggacctagactcacccgggtacagatggttgttttctaagaagagtgcatgtacccgtaattcaacatggtgacagcaaggcaagatgtgtgtgagcatgcccacatgtgggtgggcacattatgtgtgtgtgtgtgtggccagagaccaaccttgtctggttttcctcaggtgccatcaccttgtttttgttttattttatttttattttaaagattaacttattatatacaagtacactgtagctgtcttcagacaccagaagagggcgtcagatcccattacagatggttgtgagccaccatgtggttgctgggatttgaactcatgacctctggaagagcagtcattgctcttaaccgctactctccagtccattgtttttatttttaattatacataagcatatggatatgtgcatgttagtgcaggttcccatgaagactaggctctctttgtggaccaggatggtgttgaactcatgccagaaatgggccagcctctgcctcccgagtgctgggattaaaagtgtgtgccaccacgccctgctttgcccgttaattttaaatacatccataggagtgacgtcatttttgggctgtgatcatagtgaaaatactgatttttccatcctacaggatcagtgagtatgctgagcataggtgttgtttggttggtgtgaggcaaggtctcaggttgtagcccaggctgaattggagcttgaggcggtccaactacctcagtctctccagtcctgggatgacaagtgtgaactgctccaagtttctgacattggtctttgtaaatgagaatttcataactgtccagacattgattttgtgtcctcatacatgtttggtacatggcttcctgtgtgtacccattggtttccccagtgttgcttcatttgggtaaacggtgcaggacggcaggcctcgggcagctccctggctgctcctgtcacctgctggtctgtgttaccagccactgtgactgaggtattggtgtccctgtcatcttgtctgtcatggatagggaatgttctgtaagtcctgtttcctttcttccccagaagatgtaagactgtgtctgtggatttgcatgtctttgattagcagtgttctgttagcatcagagacaacctttgaagcagggcgcaggtgcagcacagtccagggaagctggtgctggtgtgtttggaggttgcctgagtgagggtttggagagagtctgtccccctcccctgctaggcctcctacccccttctgtggtgttcaagatcacaggtgcctgaagggggcagctgagagcgccaagggccagccgcatggcgtcattggtattctgtccccacaccttctccacttgatagatccttggagcgggctgcgggctatttttgcctctgtagcgctggggagcatgttaaggttgttggcgcatctgtcttccgaagcaagtcttggcaggagaggagccgtgatctgtttccagacgagtgggctcttgcttcacatgggcacaggcctggccctggtccttggcccttctacagtagaggaggcctttgcatacccctcagtgattagtaggagaggcccagtggcccttccttagggaagctcttccatgtcatgtgccccgattcatatcccctccaccccccagcctgcagttctgccgttcatctgctcacttgtggatttgcacaccttccccatggtatttgtccttcatcagggcaggctgtccctgtcatagtgtctggtacctgtgtacactactgaatgcagagacctccaaaggttggtactcactgtagatgatttttatttatgtgtgtgtgttcttgtaagtatgcatgctgcatgcaggtgcacacacattgtgcacacttggagagcaggcattgcagttgaaggtccttttctgtccctgcccaccttatttgtgatatggggtctctgtcttctgacttgattaattccaggagtctcttgtctgcttcctcagtgctgggattgcaggtgtgtggcaccacacctagtatcccagtcagggtttctattgctgtgacaatacaccatgaccatgcagcttgggaggcaggagtggtttttttcaacttgatagcttacagtctgtgatggagagaagttaggacaagggctcaaggcagaagcctagaggcaggagctgaagcaggggctgtggagggacacagcttacgccctgttcctcatggcttactcagcctgccttgtagcacccaggctcgtctgcccagggtggcaccaccacaagtgagtcaggccactccttaccaatcaccaatcacaacattgccccttagacccccccccaggtgagtctggtgggacattttgtcagttgatgttctgtcccttatccaaggtgactgacacagagctagctgacatccttagcttatcacacggtgctgggatctgagctcggcaccttgtgtttgtgcaacaagcactttcctgagggagcctttccccagtttcctgatttaaaaacaagctgtatttcattttattttatatgaatgagtgttttgcttgcttgtatctaagtatactatatacattcctgttgccacagaggccggaagaaggcgttagatcccctggctactttgtgggtgctgagaactgaatctggaaaagtggacagtgtgtttaacccgagccagatctccaggcccttgatttttgtttttgtttttgtttttttttaaagattctatttattatatataagtacactgtagctgtcttcagatactagaagagggcatcagagctcattacagatagttgtgagccaccatgtggttgctgggaattgaactcatgacctccggaagagtagtcggtgctcttaactgctgagccatctcaccagccctgtttatttatttatttttttgagacaggttctcactgtgtggcccatgctgtcctcagacttaccctttaactcaaccttagacttgcatccctccagcctcaggctcccaggggttaggattaaaggtctgcgccctgtgatctggtttgaacatgctcttttttcattttgcttcttttaagtttattcatgctagcatgacgtgtgtgtgtgtgtgtgtgtgtgtgtgtgtgttgcaaatgtggagcttagaggccgatggtgaagttggctttccccctgctttatgtgagtcctttctgagtggccagtgctttgcagttgagctgtcccaccagccctggtgattgtctgcctgtctcccccttcttttctttctttttttagtttttttctttctttctgtttttctttttttcgtgtcagggatttatgtagttcaggctggcctcaaactagctatatagccaaagataatgttgagagacttttctccctaggctatgtctgctcttcccctgtaagggacaaaagacactcgtggggaagcagtgagtttgttaggtttatgcatgtgaatataggtgctcatggaagctgtgtgctggaggcattgtgttccccagagctggcattacagacaggtgtgccacccggtgtgagtgctggggactgaatccgggtgctctggaagagtagtatgtgctcttaacaactgggccctatctctgttttcaacttttatatatatctgttttcaacattcattcattcattcattcattcattcatttatttaggatttttcgagacagggtttctctgtgtagccctggttgtcctggaactcactctgtagacaaggctggcctcgaactcagaaatccgcctgcctctgcctcctgagtgctgggattaaaggcgtgcgccaccatgcccggctattcatttattttttaagccaagatcttactctagagcgctggccggccttagacccatatagttctcctgcttctgcctctgagcgccaggattagagatgtgtgccttgtgctttaccttcttttgagtttttattttgagataggttctcagtaagctgctcagattggctttgaacctactctgtagccttcatggcgattaaacttttaactcacctgcttcagcctcccaagtagctgtcttaacaggcctgcttcaccagctgagctctgaagctaagttctgatgatgacctacatcttggccaggaccttgctgtctttccatcctgggttacgttatgttggaatgttgacatgcagatgctatggaggcttggagtgtgatggaggtccgaggtgtggaaaatgctgaagtagacatgtggggtccaggatgctggatgtggtaccctgtatggaggctaatagactttagagtatcagacgtagctaggaccagcttccctagaggctctgaccctcatctgtgtcagtggtgtggagcacaaggcaggcattgagccgggatgctcatgagagacagtgttgtctactcgccacatgcttcgaggacagggggctctgttctgtcctgagcagcacatggaggcacactgcccttcctttctctttggtctcagtgagggagagctgtgcttgggtacttttggttcattgtctgcgtgcagttggggcctcactgagcagccagttttgctttcttaacttccagatgattagttcattgaaggggcgtgtctcggagctgcagttgagtgccatggaccagaaggtacaggtcaagcggctggagtctgaaaagcaggagctgaaggagcagctggagctgcagcagcggtgagagcctgaccagtcgctaagacagtccaaaggctgcatggaggacacagcgaggcctctggacttgggaagtgtgtgtcagaataagacggtgacagcctcgttcccttcttcctgggactggcttccacagagggacgaagctacgctaggtttttgagggcgtgggctgctgtgcttgggcaagctgttctaggtcacagaggacacagatatgtggtagctagtgggtggcagtcaggagcctttggattctgccttgaaggtctggcccttaccctagggcaggcattgccttaggattgtacccttagtgtgggcaggcctgggtggcctctgatgcttgctgtgacgccaggctagcagacactgtggattgagtggtggatagagaactaggtcgtgccacaggaagcctgggctcccttgtagccccatcagacaatgtcacagtcttaaaggttggcttaggacttgaggttccctggataaggggtgtgtgtgtgtgtgtccaggctaggggtaaggttaaagtggcattatggactgaccttgcatgtacttctctcacaggaaatggcaagaggcaaatcagaagatccaggagctgcaggccagtcaagatgagagagctgagcatgagcagaagattaaggtagatgcttcctgccagactgtgcagcttcctataccaggcaggggtgggacagccctcctgtcactcacacaccttcctgcctagacgtgtgctcagtggcatatgaggatgcatgctgattgccttgtggatgccaggccctgtgctggctccttggaggccacagtgagtgctcaagtgccccagtgatgacgacccactagaaatccatgggaaaaggctaacacagaggactgcaatctaggcttagagagcccagccacagaggccaagatgagacactatgagtttgagagcgagtgctccatgaagtagagttgggggtggagatcctgtgcaagtctgcacagctaagcatggccgagcgagatcaccactccagggctctgatttaagttcagcctcctttattctggtgggtgttgctggagaggtgccgccgccgagacctcccttccatggtttcctgttgcctttactgtgatagccagtcctgggaaggagactgtgtcagttgtctccctctctgtgtggtgtgagcaccaaggcagtaggctctgctccttgtgcctctggcactgctttacctggctctgttgtcttttggacttatttgcttaaagatcaatttttatttttatatgtgtgggtatgggtgtctgcagagatcagaagaggcctggaattggagttaagatgctagctgcctaaccagatgctaggaactgaatttgggtcctctggaagagcagcaagtattgttagttgctgagccttctccctaggcccgagtccaaccttcttacctctcacaattcccttgtgcatagaggttgaccagttggtcttctctgtctctttgttcccactacttgactctacctggatggagctgggctctatgaagggtcctgatcaattgttttggtcctggttttatatatagcttgttcagtgacttgtcactaggttcctgtgctaccttgttgagagtcatagtgacaggtgcagtgtaggtacgcctgctgcacagtgggaacagatgcaagggttgcaggttcaccacccacgtggcagaagctgaccacagcgggccagaggggcctgtggcactgaaccgttggggaccagagggctggatggtgtgtggccaggcacaggcaagagggacagtggtgtgggtactggctcttgggtgctccagtgctgctccagaggtggtgttgaggatgcagcatagcgggttagccttggaacacttcctacactgtctggactgtggagaccattgaggtcctaggacaagttagaagacctttgctttgcttaaaaaaagaaaaaaaaaaaaaaggaaaaaaaaaagaaaaaagaaaaaaagaggcagccgggcagtggtggcacacacctttaatctcagcacttggggaggcagaggcatgcagatttctgagttcgaggccagcctggtctacagagtgggttccaggatggctagggctacacagagaaaccctgtctcgaaaaaccgagggaaaaaaaaaaaaaaagagaagaaaagaaaaaaaaaaagaaaaaagaaaagaaaagagaaaggcttatttaattaaaaattaggtatatatgtaggtatgtatgtgtaagaatgtgtgtgtgaatgcgggtgtacgggcatgccagagacgtcatatcccctgggcctggagttacagatagttgtgagtttgacatgtatgctgggggtcagtgttgttccttaggatgttatctacttttttcttttctggacaggtctggttggctttgtttttcatttaatctatctatctatcttccttccttccttccttccttccttccttccttccttccttccttcctttatttatttctgcaagtcgttctatgtagccctggctgttctggaaatcactatgtagaccaggctgaccttgaactcacagagatccacttgtctctgcctcctgagtgctgagattaaaagcctgtgttactataccagtctttaaaaaaaaaaaaagtgtgtgtgtgtgtgtgtgtgtgtgtgtgtgtgtgtgtgtgtgtgtgtgttaggaagcattgaggggatttagggcctcatactttcttgcatggcaagtgattactgaccgagcaggttccctagcttctgacacctccatttttttgtgtcttctcttaaactgactgtcatgatctccatgtctgtctgtctgccttctccagatcattccgtggttgaagacctgcatgtctttcagcccagcctctctgttttacagaggctgtgtgtgcagttcttctggctgcttactctctctctctctcacaggacctggagcagaagctgtgtctacaagagcaggatgcagctgtggtgaagagcatgaagtctgagctgatgcggatgcccaggatggagcgtgagctgaagaggctgcatgaagagaacactcatctaaggtgagggctcatgcacagcctgctgcccctagttggtagttgggccctgggcttggtgtccctggggcttgtcctccacgtgcgtgactgttctggccctgtagggagatgaaggagaccaatgggctgctcacagaggagctggaaggtctgcagaggaaactgagccggcaggagaagatgcaggaggctctggttgacctggagttggaaaaggaggtgagtagtgggtgagttgtctctccggggccgtcctctgccctggccggagcaccctgagcatctccattacaccttgtagttggtcagctgtggggatgccgtgcttgtgtggtgggtagtacagtcagttatgagattctccattacacgttgtagttggtcagctgtggggatgccgtgcttgtgtggtgggtagtacagtcagttatgagattctccattacacgttgtagttggtcagctgtggggatgccgtgcttgtgtggtgggtagtacaatcagttatgagattctccattacacgttgtagttggtcagctgtggggatgccgtgcttgtgtggtgggtagtacaatcagttatgagattctccattacacgttgtagttggtcagctgtggggatgccgtgcttgtgtggtgggttgtacaatcagttatgagattctccattatacgttgtagttggtcagctgtggggatgccgtgcttgtgtggtgggtagtacaatcagttatgagattctccattacacgttgtagttggtcagctgtggggatgccgtgcttgtgtggtgggtagtacaatcagttatgagattctgcagtcactgctgcctgttgcaaataggagcttctttgattaaagctcacagtgatacatattttatgggcataagtgtagctgcttagaaggcaacttgacagactcactacacacaatagctgttgcttctgtactgaggtctgtcctcagccatgagcttttgactgggtttacagtaccagatggggttccctcttctggagtgagcatcaaatccaattagaaagcagttggttaccctggtaacatacctgccattgttgcacatgtaggctcattttggctgcttgttattgtgcacacaggctctaaagctgggtaagactgttaaagacagtttttcccatcggcctgcatagtatcttgcagacctccaaagacttgctagcagggaggaagcttctagctcagttctagcttgatttatctgttcttgatggcatgtgctgtctttagcaacaacatcttactatgtaattctggtggtcaaccaatagcaatggctattttcctacattgtattagagcctcagaagcctctccttttgttttgagatggcctcactcttaacctggggctagctaattcagctaggctgggtgatcagtgagctctgcctatctgttctcctccagcattggattttaggtgtttgttctatgcccagtttttgttaaatgagcattagggagtgaatgcaggtttcatgcttgtgtgataatctgtttgcttgactgaaccatctcccaagctccatctctggcttcttttagaagtccaagccagatgagtttctgttggcaccagagagttctctgtgaccagcccgtgctgcagttcctatctatttgtgctgtcccagacaggcctctcttggacactggctttataggcaaaaagacctggaacttcttttgtcctttcctctggcattctgtccagagagccattcttttattcttgcatgagggagttaagtatagagcaagcaaaggtaaacgagcagtataataagcagcagctagagatgcagcagacagtgcaaagcagctcactgagagcttacagcatcccacagagacagctcagaagtcctgctggggtcccaggagactgttgtgggtacagtgtctctgcatggctgaggctttcggcttcacactcccacaacaggaatttttataccatgaataagcagtggttacctttgttggatgcttccccctttagctatttttttttttttttttttttttggtttttcgagacagggtttctctgtatagccttggctatcccggaactcactttgtagacgaggctagcctcgaactcagaaatccgcctgcctctgcctcccgagtgctgggtttaaaggcgtgcgccaccacgcccggctcccctttagctattcttaagcccccacccctagccccccagacagggtttctctgtgtatccctggctattttggaacttaactctatagactaggctagcctcgaactcagatccacctacctctgcttcctgagttccactactgggcaggcaccaagattttgtaatgtcataattcatagcagcttgtagttctcgtttctccttgttgctggaccaggggccagcctgtcccagatcttgacataaactggttggactctgagataatgaaggccaccttggtccgtgagcccactttcatgagcccaaatgtcatgcaaacagcacatgacatttaccaacataatttatatcacacctggatgtaatgttttttgtttgtttgtctttgacagttttgaggtttagggcgcttagcttgaagtcctatatggaagtgtgcttgctgttgacactgggtctatccatgcccacctgtgaaaagtggtcagggcctagctgggaacagtgtcctgtaatgctggtggtggaaaagttagtagctgagcagctgtcccacccttttaaagtttttattttatgtttgtgtgtgtgagtatgtgtgtgtgttagaaagagtgagtacatgtgtcttagtgtatgtgtgtatgtatgtatatatgtgtgtatgtgtaggtatgcatgtgagaaaaaaatgagtgcacatgccacaatgtatatgtgtatgtagatatgtgtgtgtgtatgtatgtgagaaaaagtgaacccatgtgccacaatgtatatacattttgtgtgtgtgtgtatatgcatatatatatgtgtgcttgtgtgtgtatatctgtatgtatgtgggaaagagcaagtgtgtgcatgtgcagtggtgtttgtgtggattttccaggacaatttgtgagagtaagttttctcccactgtgtgtattctggggctcagactcaggtcgccaggcatggtaatgagctcctttatcttgctggccctcgctatgctgcccgtcctgggcacaggtttttttgtttgtttgtttgtttttttaaaagtctagttagtttttatttaacaaatctccaaaagctttttaagggagagttgaaaggccaatcaacagattgttcacaaaaattaaatatccatctgagtttaaaaggtgagtccataccttaaatgctataccaaagtctgctctaaatgtaaaataggaaactatgcatatgtttcttccactatagaagcaaataaaataacatttataatatcttaggttttatattgactatttagctataacttacaacaattatttataaagaaaaaataacatgataatttgaattttatcaaaattggaaactttgcaaaatgaaaagttgacagtatgaaaacatgagctgggcacaggttgttttttgtttttttgtcagtattattcttggctggcttggaacttcctatgtagaccaggctgtctctggactttcagaggtctgcttgcttttccctccagagttctgggattaaagccatggggcatgccttgtgggccgagaacctttaaaaacaattttatttaactttttgttgaatttgtgaatttcatatcatgaaccccaattccattcatctctttgtcctctgccctctgcccttgtaacttccccccaaaaagaaagaattgttgtaggaactgtagtgttcattgcaaagagtcatttggctggtttgaggtctctggcttctgctacactattagttcctgaccggaactcctctcagatatcctgtggcatagagatcttgcagctttggatctgcagggctggtaggtccagaatcatgagtgaacccttggtatcagctatgtgctggccccctaaagatggggctgatctgaagcacatattcatttcagctccaaaggggtagggagagagactttgtgggaatcaagctggtctggagcaggcacacgggcatagatgaccctgtttcctcctcatggcttgctagcccgcatctaagtcattttggtcctggcctaccatagaattagggaaaccgtggctctagaacagagtttgtcggtcagtaggtctaggacttagcattctaggacttagctttctgaaagaggctcctggctaatttggctggacttgcaccatggggcaggaaggagcaaggcctaggccagtcatgtaccttcatctgctaagatcacctaaccacctgtgatcacagataggatgggagactccagtacctttgtcattgtttgctttcacatgacagttgctgggcaagagatactgatggctataactgtctttctagaagctacttgcaaagctgcagagctgggagaacctggaccagaccatgggcttgaatctcaggtaggtaagctgttgctgtcttcacccctggctgctggcttccagtgctttcttctgcctcctggctcagagtctgcagaggacagggcaggcaggctccttcttgtgctgtggtgaggagctcttgtttaggcttaatgagtgctttacatggcagggcgattgagccttactgtaaagactgttgagaatctgtatctccacagagctgatggtggggaaagggcattgcaatggcctgcatgctcacaggacccagtgcatgtaaggaagtcactgctttgggggaaaatgataaactttggggattgactgactgagttaaaacccaataatactggaagattcatgtcccactgggtcctttggagcatctcatgttactggtctgtgtcaggtatgagtgcagaaatgcagagtggatcacagggcagagatgctgggcactgtgtgttcaacacatagcaagggcagggtgttccctgtggctttcccatctgtacagttgtgaggtgtcattcactgatggcctgatgcatttgtagttcagttttgggttgactctcagctgccatcaacagctgtgatccctgagtcttggtctggctgtcacccttcatgatggctgtgtctgttctaggactcagggcagttgtggtgtattagttgggataaggtgttggagctaaggcctgtgggattcaagcagccctttgttgtaatacttccggcttgctggctgtcttcctgctgctctgagtaacaaggccagatgaaaactgcctgagctcagctgtcttataatcacactgtcccctgctggctctggagccgtcaccttttgatggcagcattgccttccattctgttacttgacagtgcctcttcatttcctttccagtccatctgcagaacccttctttcagaggctggcccagcaggcccagtgctgtgtgcttcctcctgtcttctgggcttgttagctgccggcaagggtccctcctacccctggggatactctgcccagacaagacacctccgtgacttctttcttgtgatggagatcagaggcccctcatgcccagttggaccagccctgttggaacactggtgttctggtttgcctgcgtgtctggtgcctgccgcatggtacttagtgtcaatcagttctgtggagccgttgccttggctggagtagcacaggtcacagtggccaggttgcagtgtctagctgctgtgtgagccctttccccaactgactgccctgtgcagagcttggctgctttgagggcaagctgatccttggttgctgtctagctacctgggccaagcaagagagaggagtgggtgcttatggtgctccacattctcatcgaggaatgcggggagacccttcttaggagccatactgccctggacccctcttctcttaactgaggagtgcagggcttctaccagctgtgtttgtaaggtccagcaggctcatgtccttaggaagcatctcagctggtaactatcctttctagaaggcaaagggcactggtctcttgcttcatagcccccttggtctcctgatagctgccgttcatgcattgccctgggctgctaggctgcctggcaccttggaagctcagtgtcacctgcttaccttccctgtgcaccaagggcagagatttgggtacaggccagggtcaaggctgaactctgggtgacatggattcacccttgtggctacacttgttctgtgatggtgacagatgcagaccagctgtattaaatgtgctcccttaacatgagaagctgggtctggggccaggacatatgctggagtgtgcactaagaatgtgtgatgcagccaggtgtggtagtgcaggcctttaatcccagcactcgggaggcagaggcaggcggatttctgagttccaggacaacctggtctacaaagtgagttccaggacagccagggctacacagagaaaccctatctcgaaaaaactaaaaaaaaaaaaaaaaaaaaaaaagaaaaaaaaaagaaaagaatgtgtgatgcctgggtttatttcccagcaactggtccttaacaagtggatgggggctgaggtactcagtggatgaatccattaccatgcaagccagacagcctcaggtagatctctagaatgtaggcaagggtacaggagagaaccagttccacacagctgtcctctgtccttcgtacatgagttgctgggatttgaactcaggacctttggaagagcagtcagtgctcttacgtgctgagccatctcaccagcccctgtttctttttttaacatctgtctctctttctctgtgtgtgtgtgtttgtatatgcacatgcattcgtgagttcgtgcccatctagtgtgtaggtgtctgtgcaggccagaagagggtgttggatttcctggaactggagttacaggtggttgtgagctatcatgtacccactagaaactgaatatggatcttgtaaaacaaaacaaaaacaaaacacacacacacaaaaactcagacagtgagtgcttttaacagccgaaccatctcttcagccccaaggcttcccctaccaccaccacctcctcctcctcctcctcctccttcttcttcttcttcttttttaaagatttatttatttatttaatgtatgtgagtacactatggctgtacaaatggttgtgagccttcatgtggttgttcgaattgaatttttaggacctctgctcgctctggtcaaccctgctcgctctggtcaaccctgctcgctccagttggccccgcttactcagtccgtgcttgctctgacccaaatatttatttattattatacttacgtacactgtagttgatttcagacgtaccagaaaagggtgtcaaatctcattatgggtggttgtgagccaccatgtggttgctgggatttgaactcatgactttcagaagagcagtcagtgctcttacctgctgagccatcttactagcccgaaccttttattattattattattattattattattatttttttttttgtggtaggttttgggaagttgtttgtgtaaggctaggagggtgactgactgaagcatgaggtactgagattggacatgatgcaggacggggcagaagtaatggaaggatggggcaaagttagggttcagtgccaggacagagtctccttagaagtcatacatttgcctactcacatagtcatacatgtatgtacgtatacataagcacatatacatacaaatgcacataagcacaaacacacagcacacccatacacatacatgactatgtattagttcaaggatgcactctttagctggagacagcctgcatgtctacctgtctgatgtgtaacactgtggattctgagatgtagcaaccagtaggtggcactgcctccttgatgatcagctttcttcaaggaggcctgtgagcacctgtggcagcctgtcttggggcttactgcccttccataggaacttcctcactagtatcagggatcttgttaactgaggcacaaggggtctgggtccactggctgccttcttatggacaggcaggttgtcaccaaagtctgtgctctccctgtctgtctgtccatctgtgaccatcatctctcagagtccttgtcccctagggtctgagtgctgatggtgaatggtgcagatcctgtgaggatgaggtctggctaccccgaggggctcagccgtagtgtggctgttactttcctcattgccgtgacagacaggttatctgacagaatagcttgactctggctccagtgtgagtgtatagtctaccaaggtggagagcgtggtggcaagagcatggggcagctgctcacattgtgtccacagctgggaagcagagagatgagtggaggctcagctgctttctcctttttattgagaccagctcactgaattgtgccatctccattcaggttggcttgaaactccatggaaacacctttacagtcgtgccagatgtgtgtctcctaggtaacagtaaatccagccaaactgatcatgcagattaaccgtcatacctaggttaaaagagtgttttggcctgtgtgagttcctcatggtgtaacagtgttgctctctgcactgtgacacttcttatgtctgaggagcctagagttattaggggggagtgtttaagccactgtaaaccaggaatcagatgctgaaatctaactgtagatacactgtgatgtgtcctatgcattgggccacgtgggtgaggagaaatgggcctgtcaacctgtgtccagtgcatggaatcatgtgggctgggtcagatagctctctctactgtgtgtctagtgcacagggccatgtgggcaggaacacatgcttctgtcttcctctggtgaatccagtgtatggagtcccatgagctggagctgacaaatttgtatctatttgtgtccaggtcagtagggtcgtgtggactggggtaaatgtctctctcagatgcatctagtgccatggggcatgggggctggggcagatggtactgttgtgaacggtgtggttatgcacagagtcacatggggctgagcacacagtgctctctatctgtgatgtgtccagtacatggtgtcatgtaagctggggtggatgtacacagggccatgtgggctgggggtggacaggctttgtgccatggagagtaatgggcaggaaagtgcctggcagtgtacacatatgatgctgtggcatggggtcaacagagccttctgtgttgtgtggcaagtaccagtgtgggtaagccagtgaccttaatcctcagggatttttttgaagttctgtggggggttggcacagtgttgtcatgaggagcatggagagtgatgacatcttgaccttggtctcttggggcagactgtgggaaagggctttcagtatggagagtaaatgactgcagacagaaacagcctgcacgatggtgtggctgtggagagaggctggcaggatggttttgattgagaacattctgaaagctcagaaagaagggaaccagagagaaggcacctggaaacaactgcggcggatccaacgctggtgacccttatgctagggatgaggcatgtgttctcagcatcgtgctcacactgtagatgctgcccctcatggggatgaggccacatgttcttaccttcctgttgaatttcctcacctgtgtgactaattacagagcaggtcatcctgggagtgagtagatgcttccttgggtaagtatgcttgacctgagttccttctggtcatcaatacccatgtgaagaaccaagcatggctgcctgtgcctgtaacctgtatccctagcactgtgaggggcagagttcagagagagaccccatcccaagagaataaagcagagaatgacagagcaggacacttggacagcctctgcacacatgcatatgggtgtgtacacatgcacatatgtcccctccctgcagaaatcaggatgtgtggcctggataggaaaaaactatctggagacaacataatcttgtagggcttccaaagtatcaataaaaagctctttggacccatcagccaggtctgcagggtcctagaacgggtgacagttgacaagaatagacggtatttctgagtaccgtggtgacctgtgggaaggacacggcgtgtatagtagcatcaaaacagtgcagcactgagggataaatttaacacagcatgtccaagatctgtgctttgcaaacattaagatgcagctgtcagtaattatggatgacctaataatggcaggacgtggtaagagacaggggaggagaaaatagacccttccctctttgctcccaggcgcctgctcggccccgcaccctgacaccagatggtttgttttttttctgcacagcaagcagttctccagtagatgccagctgggcgtcctacaatccagctcagacactgtcagagtccgggttggatcccacaggttgagacctcagacctaaatgattggcctactaggctgcctgttctcaatcctaggttgtcaccaaattccaaagactggcaccaaggtgaggttcccagaagccccttgggttaatttgctagctgtgctcagagaatgcagaaacacctttattgtgcctgtccatccttgtttggtttgtgtttttgagactcatgtagctcaggctagcctccggctcactgagtagctgatcctgaactcttggtcttgctgtttccacttcctcagtactaagattttaggcattcacctctaggtccactttatatagtgctgggagtggaaccaaggtcttagggcacactgggtgtgctggctagttttatgtcagcttgacccagctacagtcatctgggaagaggaaatctcagttaagaaaggcttcttcattaaccccacaggttggcctatgatgccttttcttggttaatgattgatgtcttggggcccagctgacttggggcagtaccaccctgggcaggtagtcctagttggtataagaaagcaggcagagcaagccgtgaggagcaatccaataagcagcattcctccatggtctctacttcattcggttcttacttccaggttcatgccttgagcctcttccctgacttgcctggatgatggactgtgatcaataaacccttggtcttggtcatggtatttatcacagcagtagtacctagctaaggcaccaggcaagtactcaacactcgtccacctgagccacgtcctgtgtctgtcagctaatctttgcactatacctgcaccagatcgagtgcttgagtcactccccagtcctgcatgctatggacagactgatttctccatgctgagggacaattactttgtttcccctaagtaaacagcattagcattgcttagataaattcctaaaggcgtgtttggcttttttttccttggttcaaaagaaactgtgtgtttagaattgatagctgatgccaaattgccctttgaaaagctgtatttctacacatttccgtcagggaatgggagcccatggcttaattgggtgagtatgctttcgaaggttcaagcagagatgcagagtgagtcacaacagagcgaggagagcaggcgactttactgcttgggctttttaaacactatacttagcaattcagatggaagcaagaggcttattaagcaggctcagagtgagtgttggaccctctgtagtcaggcctgtgttctgtgtagggaataatttgccagtggctgaatgcctctgctacttggcatctgactctgtcacttttgtgcctgaacctggccttgtttcagatcccttctgggtggtcattatacctgtcagagtgtgtgtgtgtgtgtgtgtgtgtgtgtgtgtgtgtgtgctgaatggcattgagaagtgctgtggtgtgggccctgggaggccggacatcttcccacttcaaactgctgacctcaaatcagagttggaagccagcaagtgctgacctcggctttgctgaagcatctctaggccagccagatgacacgttctggggactagcttccccgatgtgcaggccaattagggggactttggggagagtgagtgggtagactcacttccaagatgggagcaaattggccaacccagccccacactccgctaacctttctctgctcaatgtttgtaatgaccctggtgtcttgttgatggatatccagagcttccagtgcttggaaggttagcgagctgctgggtgtcttgatgtccttaatggctggcttttagttgaggcctagctgtgaaagagggagagtcatacctgcagtgtggtctgttcctgggcttcagttggcttattgctcacagctgcttatgttggggcctgtgttctggagagggagggaccctgctggcttatgtgtttgtggcgggcttttcctaccagtggtctcaggggccttacatattcactcattcctaacagagtctccggctgttttctgttctggagattgtgaaggttttgtgtcagctagctcataagtttgatgatttggtacctaagggaggggctggtcttctgagcagtaggcttttagtaaacactgggggcgagtgtgatgaggggtgtgctgtggtgcttggctgttgcctctggcaaggccctggggcggcccatttgtgcctgccagtgggaagcagggcttcaggacctgtgaggctggggaagtagctcttgtgtttctttgccacttataaagttgcaggagggtcttcttggggtactgatgactgtctgcttggagtggatggtctcatctttccatgggacaggatgggagatagatgttctgtgttggctagtgtcatccctgtgcctgtcatgtgccagagcagggctggaggcagtgggatgtagagcgtggagatgaaatgcttgctggagcagacaccacacatgcacacaggcagctacatgtacagcagggagtggcttggcccaaccagtgctctctgctgtttctcacagtgcctttgggcctttcttccaggttgtgtagatagggctcatctcaagtgcctgctttggagttgatttagcagaacccaaagccttgagagcattggggatgtgatgtgcacctggggtgatgtgtcaggaggtggctatggctgcacccctggttcacagttggtttttgttcccttccttcctctacttttcctttctttggtgtgtgcataatcatacttatatacatgtatgtgaagggcagagcttgaggtcagatgtcttcctcaatcatgctccaccttcttttctttcctttttttaattgttagagaatttcacatatgtattttgaccaaatattccatttccttccagctccccctcactatcctctcccaacttccagtgtcctttctttcaacctacagagtccacttactgccaatgtgtgcataggtgtcgggccacctactggaacatgggtacctttcattctgctcccttccccaagccctctgccgcccatgttgggatttccactggcttgctcttgaataagtcttatccatgcagcgagaatctctgagtgcctaggtgcagtggccctgccatgtctagagaatactgcttcacagcaggtacctgtgacctctggctcttaggaactctctagaccctctttcacagtgacccctgaaccttggtggatggcttttgatacagatgtcccgtttaaggctgagtgcttcagtctcttattttttgtacaccaactagttacaggtttctgtattaatggctgtctaccatacaaagaagtctctttgatgaagattgagggatgagtatgaagataagtacttatggggcaatttaatactagatacttcagcagaacgatagtagtagattctccttcaggattcttgatctagctaacagcataaggtataactgcatctgtgtggtgggccttaagtcaattagaaggtcatttgttacactgtaacacttgtactgctgttgcccagggagcatctcttgctaggcaggttgttgtagacagaaggttttacagctcagtaagactatgggttgcttagctgtctggtagcttgcacggcacctaccttcatgtgctatgaaggctgctcactaggaatgaagctttcaccttggtaccagcttggtttttctctgtcctatgactcaagtatgtgtctactgtattttttaaggcagggtctgtcactcaagctgaaacttgctgtcctggttagactggccagtgagctccagggatcctttctccccttctccagggctgggattgcaagcctatgctttgtaccccaatgcctcttacacccccttttttattttgagacacagatcctctctatgtatcccccgctatcctgaaactcactatgtagactaggcttgcttcaaactcacagagatcctcctgactgctttccaggtactaggaggtgtatcccaccgtgcctgggtccttctctcgtgctgcaagcactttcctgactagccctggtggattttgtctcagcaggtgcttcacttgagtcctgttacctactatgtgtcctcttctgaagtcaggaaccccagggtgccaggtccttctaactctaagcagagtgacagtcctggggccctaggaagcggaacggctctgataggaatttgaagggcatcttgagggtgaaaccaactgagcatagactagagtagggactggagccctcttctgagatggtctgtgccaacctccttttcactgagggttttcccaaagctaccatggctcatgggcttgcatcatgcagactctggagaataattaggaagtttgggggcttgggcttcccacatggccatcactcttatgaccataaggtgtgagatagtgaccctggatgtgtcacctaggatcatgcacctgtcaggggctttgtccctgtccttcctcacagcagttgttactggtgtcagaaactgcaaagctttctcaagttgctctgttcataataacctccctgtgctgggttgtctgtttttggggattccctcgctgtagggtgtcagagaacccaggtcattagtcttctatagtctctgcaccccttttcttgcatctggcctctcacctgcagaatagagctcatgtctttccagaaaacagatggaggggcagcctagacctgggggtggctggccctcatcccacacagggactttggtagagagctggcacactgagcccttcaagcagatgtctttatatggagctacagcaaagagagcaggtttgcattcagcagtggaattgaattctcatttaaaactcaggaggctgcaatgcccttccattctctaccctgcctttgtgatacttgagctcttacatgaataaagagccctgaccacccccaaatgcagagctaccttgcatccgggcaggttgagcttaggtcttcatttacatcttgccccacacacagccaaccactgtgctctgctgcctgcatctcagtgagggaattggactctgagctcccatataagcatcggctttgagtccatggctcaaactcttcagtgttcacccagagcaggctgcctgctgggacaggacctgagaatctgggtcctgcctcccagctttgcattggtatgtgctcttccatcccagggcctgcggaaggaggtcttacaggcagacctcttgctgtggggaagatgggctcagaggcaggtttcaagagtagtttcccagctcctgctgcccatgtatcttctccgcttgactctggccttgtccctaggctccaggaggccacctcctgcctttggttgggcaagatgctggctgggtggtggcaggtggaggattctgaaatgaagcatgaagcactgtcactgtagctgttacacatgtcacactcataggacacagagtgccagaccataagctgcaggcatcattccatgtcttcagaacacacacagcttgacaatgggacatagcgacagctgtcaggatgtcctgggagtctggctttggctgaagcttggcatttgcagagatcatggttgggagcacttgttgaatggtgccagtggagcacatgacaaatgttacacacagcacttcttcatcttaacacgagtgctaggaaaatcctgggattgcacacctgggtacttgtctggaaaatgcagtgatctctctgctcattctcgagccagaaaagcctctgaattgcttttttttttcttccttattttgttcttgtctttaaaaataatgtttttattccatttatttatttagtatatggatatgtatgcacacatgtgctatgatgcaatatggtggccagagtgtggtctgtggatgtcagttatttctttctacatgtaggttccaccatgtgggtgccagtaccaaactcaggtaggcaggcttggtcacaggttcctctctatcccctgatccatgtctctgaccctggttttggtttttgagatagtgtcttaggctaatcttgaacttgctaagtatccaggaatgactttgaactcctgatttttctgctctgcctccccagtgatgagattataggtgtccaccactatgtctgcccagttcatggggtctcactttcgtgcatgctcagcaagcattctgccaactgaaatacagccccattagggaaacagttttcacatagttcttcccttaagtgtgggatctcagtttgggtagagttgtggttggttcactcagttctgtctataagtgaggaatctcatgccaagtggagttgtgttcaggtagactcatcaggctggtatttcataggccaaagtatgcttgtactggagggatgctagagtgaaccagaggaggcctgtgacctgctcttagtgtggatctgtctatcctcagaggctctggcttcctatggcctatgcaaactggggtgtgggacttaggaatgtttattctgtaacttgtcattagaggtagtagtctggtagcagccaggtgacctgtgtttgtggactgtacacctggtacgtgttctagggcaccctattggattggggccagacctgttgcgtatttgctggtttgatgctgttgatgggaacacagcctagggcaggaaacaggtgcctttttagagaacccacagcccactagtttgaagatagttcttgttcggatggttctgaggtttcttagttgcttgctggatacaccattcaggatatcaatgctgtatagtagctacagtctagcctgtaccttggtagcttctctactcttcctcatctgcctgtggctctttatggcctctgcctgatggtgtgggacgagaggcccttggagggaccagtgacccaatgtcagccaagtatgcctgtgtcttgctgggctgcgtggctgctcctgaagcgtggtgggctctgctcttggtaacctccatccatctggcctgccacctgtgccaggcagctggcccgaagtctctgtgggctgttcagtcccatgctgtcacatttcctttctgccaggggccgccattttggagcatagcacaggcacatgtggcaggaagccccagctggaggctctcttacagacctgtctgtagtactttggcaaggcctgctggaaggcttgctccgcccaccacctttgccctgcctcccagctggatctggaactgctcctggcgtggaggctgcctggtggaggctgccaggtagagcgcaggcagccgtcacttgggagaggaaacatttaacttttgaggcagcaacacaataccatctcctctgtggaggcggccgaggtagaagattagcaattaattctttattacgcgcaaactcctcttcagttctgtggacccaaacagtcctcccgcctcgaggagggcggctccactcagtccattccccagtgcaccgctgctcggctgctcttgagctgataggaattgcttacgagtcttcatggaagacattcagatccgcagttctctggcttcctacttgctcccccgcctttccccctcttctctggtatagtttattgtgcttcggtctcaggagcatcttgctgtttattgggattgcaattatagaatacaggtatcagctgccttttaggctagacaagttgtagcacgctgattttcattttctttaaattatagctttttttttttttattgaggagagtgctgttattggtcttgcctttagtttggaccgttttattgtttactgtagcttggatgaactgttggaggcatgttggtaggtgttgcttctcagttatctgcaaattatgaagtgtgatggtttggcgttgaaggcactgtgggctataggtcattgttgtagtcttaaaaaaaaaaaaaaaaaaccaaaccaacagccaccatgacagtatgagtaactgaacccagcgatgctatgtccaataaaactttacttttggcctgagcatgtagctcagtggtagagcccctgcctagaatcccccaatgaagggctgtggtgtagctcagtagtagagcccctgcctagagtcccccaatgaggggctggggtgtggctcagtggtagagtgcttgcttagcatgtgtgaggccctgggttccttctatggtagcataaacaagcaaaacaatttggttttcaaaaccactatcagtcacttggtttaaaggcagcatagaacctgtctcttccttcttagtagcttagcttacttcctgataactttctgctctggtataccaggaagttttctcttgtcttggtctgcaagaatctaccagcatcttgtgcccttatttgacagtgttgggcatgtgttgggcatgagcctagtacagggtggggtggtgtttccaagcttcaggtagtacctctcttggttagaatcttgaccttggtcaaattgtgcctcacatagtaacctggaggtatctgaaggacataggactcccttgaggagattttaagggacctagtccctataaagtagcttcagggtttagaaacatggtcacagagtccaatgccatggtatgagctgagggtacaaatagcaaggggacctgcctgccacagattaggacagcctccctgtcagggttgggctctcagaaatggctttatgaaactcatccttatagattgggtagctggtgctaggggctgcacagggacctacaggtctgagtgcatagtcagctctgggtaacatgctctggctttcttgggtatggtgtgagctttattcttcttatcatagcccccacccccaccctagcctccttcagccctgaggctggggttggggttgagactacttgtctccccaccctggccgggctttgggctccttccctagtgccaggtgagccccacatcagtctgtaagtaagacctgcttttgtttccatcagcaaacatgaacccttgtttatggcctttccacttactgacaacccttgccaaattaattttatttaattatctcccagggctaagcttgaatacattttgtgttaaattcacagttttttccttttctaaccgaaatggacttaatatccttgttaaaatctgattaaaactaaaattgagttttttgaagtctgattatcccatgaaatggaatttttaaacctaattacgagtggatttgcatacacttttcagcaccattgaaaagaaagtcgaaggaaatttattaatgacagcctttcttgcatttccttggggcatgacgttgctgtaggagcacgggggaggcctccgaggaaggctgtgtttctccccacccctctttggggaaaaaaaattcactcctcagagacctcgtttcccagaaggctgtgcttcatcttgtctctattctctctcgagcatcagtgtttcagacttttctgtttcccttgcagagtccttacggagggtaggggtaccagatgcagcccctcctaggctctggacccaccccacagtacagacgtgtcgcccgcaagtgtgtcaacagcaagcctgatttcggcttatgtttgtggcatgtgtgccatctttctgtctactgtgtgcagtggttgaggctttcctcagctggtttccactgaggtccatttctgtgcttttgggagccatgctgcctgctcccatttctttgtggagggtgagggccgtcaggcaagcactcagccattgagctccacagctccgatcccaggagtgggcctgatagtaatgtttctttctggtaaaaatttccctcttgttgccccaattaggctgggttaaacttggctgagcagaatcacttacatcacggttcccaggaagtggggggtggggggggggcgcggagaaaaagaatgaatgaatgaatgaatgagaaaaaatgagctggtttcctttccccctttgcttgggcccgcagccagagaggcagtgttgcccacattcagagtgggtctccccttagttgatcccacagacatgactgactaagtttggcagtcttcaatcaagttgatggctcagtgggtgtaggtgcttgccacacaagcctgaccaccccagtttgattcctggaacacaggtaaatgtagaaggagagaactgactccacagcttgtcctcggacctccacactcgtgctatggctcgtctacccttctccccataacacacagagagagtcacagacacacatacactagtagtattattaatactgtcaaacttattttagggattttgtatagattttagaatcagctttgcattttctgtgtatgtgcgtgtacgtggggtacacgaagaagtgtgagtctaggacattcacattgtcctgcagccctcacacagaactggtcttgctcacttactagacactgacccttgtagcctccattctgccgtctgtatggttttggatctaccagtcagcatatctcacgggagcagggtcctgcggtgtttgttactttgggactggagcagttcattgagtgtcatgttcttaaggccagcttgtgttttagcaggtgacagggtttctttaagattttatttttacttgtgtatatgtgcatgggttcatgtgtggatatgtacatgagtgagtgtgtatgcctgcagaggctggaagagggcatccgattggctggagttggtattaccagcagttgtggcacctgctgtaggtgacaggaactgattctggcttcgttgatagagcacaatgattcttcttcattgcagagctttctctctgcaccttcttcatctattttggagacaaggttttctgttgttcaggcttcaaactcgccatgtagccaaggatgacatctgattctcctgcctcttccctcccaaggaattaccaccaagagtcactgtgcttgttctggtcactatgcagtgctggagaacagaacccaggcctacacatgcacttgggcagttcctgctgactcagccacatctcagccctgcctctgtcctgacagcctcaaggcagcagtttccttttaaaaatcatttttctggctgctcttccagaggtcctgagttcaattccagcacctacatggtagcacacaaccatctgtaactccagttccaggggatcttatacccttacaacatagcatattaaataaaagttaaaaaatgaaaaagaaaagaaagacatttttcttttctttctttttttgggagggggaattgggaggagcagtagtactggatattgaacctgcttcttcatgcatgcaagacaagtgtccaccactgacctagaaccccattgtccgtcctttttaaggtttcccactcattgtgggcatgagctttctcttctctcatggctgtgagattgctttggtttggtttggggccctggctcttgtgaagaacactacataagcgtgtgtagacacttgaagatctcacttctagctctagggtccacactcaggctgaaagctccttctagtttacgctatttcgggagccacagagtgggatctgggttccaggaatgctcctacatgggaccaagggttcccctcaacatgtaaggcaggaagcttgccagcagcactgaactcagtgttaaggtgacagtggggtcccctgagtgttgtgcagacctaataacaatgtgcttgccttatcacaatggggcacacatctttggctgccagtgccctggggttaaagaaacctgctttagaattctagaaataagtggcccacttcagaaagtctccatcacctttgctttgacttgttttgtataatcttcaaaggggcacacagaaagaagactctctttggattcctcttcaataaaaagcaagtagtgtgcggtgtgtgtgtgcggtgtgtgtgtgcggtgtgtgtgtgcggtgtgtgtgtgtgtgtgtgcatgtgccacagacatagagtgagctcagaagacaactttggatgttgatcatcaccttttactgcagttctgtgagctccagattttctgatctatgactttcctggaggattcctctgacttcccctctcatcttattagaggagtgctgagactatagacacttgcctctgtgtccagtatcttctgggtcctggggatctgaagtcagatcactttgccaccctgagccatctttcagcctttagttattattccttcaaagataccatgtccgttcaccatccatccatccatccatccatccatccatccatccatgtgtatttacacatgtaatgtaatgggcatgtgaagattaaaggaacaacttgagggctctttgcttcaaatgcatgggtcctagggattgaactgtgactgtgaggtctggcagcaaccatctttgcccactgaaccatttctcccaactctcctggattcttctttaaatatccctcccgcctccccccctcctctctctttctctgtgtgtgtgtttaggcataactttgtcattcatctgtttgaggcagggtctccagtagctgaatgcacaagttgcaactccctttgagttttgaatgagatggtaatgacatgcagtgcgatggccggttccttggtacatgattgaagggtgttgaagacacgtcacctgtgctcctctcctcaggcaggcaggtcacagcatgttctcttactttccctggcattcctctctgttcctgccagtctgttcctgcccccgggagacagcactgttctcagttctgtttccaccgatcagtttcctctcttccagaattgtaaatcagggaaatgtgctgttcctgcctttgatggcttcttctttttcctggggcagaatcggaggctggtctctgttcctggtaactgtaagatggggcctggagatatggtctgggcctatctgtgctggtgatgctctagcttcatcatcttcctggccctggctttgctcaacatgatgcttttctgatgaagcatattttggggcacatcaggggtcattccttcttgtggtctgttgcagggacatgaggactgcatctggttcctgttgggaatgtgacatggataccttcatcttgttgtgtatggatttacagccttcacctaagctggagcctaagagtgaaattgcagggccagttagtcagggtgtgcttgacgtgtgcgaatggccatgtgggtttccagtgaggtcgctggcttggtgttcctcttgtagcctcgagattccatatgcttcacatcagctcatcaaggctgtgtattttattcttttttttaaaaggcaattatgtaattattctagtgggtatgaagtgctgtctgtttgggattttaatcgtatctgctcagtgactgattccctagtgtcaatcttcaatgttctgagtggtttgtgctcttttgtgagtgtcttttctgtgtgttttacaccttttattgatttattttatattcctttgtgtagaatggtcatattctcatgtctgtgtggatgtgcactttagaccaagcatgtggaggcagagaacagcttcagatgtccttgcctgacaccttgtttgaaacagggtcatcacctctgggaacctcagattgagtgcctgtgagatcttgggcattctgcgtctaccttccatctctccagaggtgtgcttggattagagacttaggcattattcctctaacacctttcaccccttccccagagagccatctcccagtgcaggagagttttattttaaagttatatttatttttatgtgcattggtgttttgcctgcttgtatgtgtgtgagagggcgtcagatccccgggaagtggcattacagacagttgtgagctgtcatgtggatgctgggaattgaacccagatctctggaagaccagctactgctcttaacctctgagccatctgtccagcctgcaggagggatctaatcaggttcctgatctaatagctatcagccatcctgccatgtaaagggaggtcagggaggtttctgaatctgaggacctcagggaagaacagactctaaactgttgtaggtttaaaagtataagaaggaattgcttctttccgtatttagaacatataaaaacattgcccacagatggtctctcttgcccacttatggtcttctctctgtagttaactcagttctgtgtaattagttcttactgggtctcatctgggttgatggtctcatggaaccatgtggctcttcactgaagagcagtctagaagtctggatgctattggaagttcttgcccagagtctctggttcaagcagtggtgtgtccttcccgcgagtacgagcaggcttggtcttccatgggggaagatgttgactctgaccatgtttgcccacagcctcccatcgggattgagagtacagtaggacagtctggagacggcagatggtgttcaaatggtgggtctgaggcagacttatagcagtgatgtgaatgaggaggaaactggctttcctctggcatcaaaagcagagatataagaaggcaattagaaaattagacagcattgtatgtctagcgattaatcctgtttgaaagaaatggaggtcagcatgtaattcatcagaatggatgaacatcatttttctacagaaagtcttggtgtacaacagttgggtgaggcagaacattccggaaatataccaaggattgtcaaatgaagagatacagtgaacctggccagggtctcgccatttttatttttacagaacattgtggacaggtctgaggcgcatccacccagttctcgtgtgcgtatgagaaacagcctgtgtgtattgacttggtatttgttgctctactcaatcttcttttgctgtgcgagtgtctgttttagatcctgggaacatgtgcagtacatttctgtgtgctcacacaaatgcatgtgcttgtggaggccacggcacatcttagctgctgttgtctactaatgctttctgtcctttccagacacagtctcactggcctgggatttggtgattagcctggcctgccagcgagcctcagagatctttctgcccctgctcctcagccctggattcataagcatgtgatactatgcttagttgctgtttttttctctcagactttatttttatttaattttgtgttattattttatgtgtatggatgttttgcctgcatgtatgtatatgcagcatgtgtgtgtcctatgtccaaggaggacagaagagggatcagatctcctggacttggagttacagatggttgtgagctgccatgtgggtgctagacctctagaaaagtaaccgtgctcttaactgtggagtcaactcaccagcccccatgcctagctttgtgtgtgtgtgtgtctgtctgtctgtctattgtatatgtctttttatcttcctgacactcagtttccaaactgaaggaagtttgtcttagaaaggaatgctcatgtggcaagggacaaagtgaggctggtttgtaggagagatggggatggacattgctgacttgagagaactgaatgctaatttaggagaaggggaagccaagagccagctcagtttatgacatgtggctttcagctgtgctcaggagctgcggtcacacacctccaggtgggctatgaacagggcaagtacgagtgatttgtaacagaaactgtgagtttataaaagtaacagagtcctggagcctctaatgtaatagtggggctgccgtacactcagcctggcagagagaaggtgccaggcagagagtgaggcctccagtccctgtggttggtgccctggtacatgatgaggtgagcttggacatggctgatgctgaggttactagtctccatctcacatggctgatgctgaggttactagtctcatctcacatggctgatgctgaggttactagtctcatctcacatggctgatgctgaggttactagtctcatctcacatggctgatgctgaggttactagtctccatctcacatggctgatgctgaggttactagtctcatctcacatggctgatgctgaggttactagtctccatctcacatggctgatgctgaggttactagtctccatctcacatggctgatgctgaggttactagtctcatctcacatggctgatgctgaggttactagtctcatctcacatggctgatgctgaggttactagtctccatctcacatggctgatgctgaggttactagtctccatctcacttggcattaaatctggccagccagctgtcatcctccaaggaaatgaaagtatttcttttaaagactctggctgtatggaggaggtcatcatggtgcactaacctgggcctctaagctccccctgctgtagggcgagtctacaggctcactctgtatccaagtgtgcttgttagtgttaactgtcagcttgatgcgacccaaaattgcctgggaggagagtcttagggaagatttacctagaacaggtttgactatagacacctctctgagggactgccttcattgttaattggtataggaagtcccagcacattgtggtcagcagcagtctctaggctggggatccagaacagtttaaagaggaaaatactagctgagaacaagcaggcaggcaggcatggatccagatctaggtgtttattctttgctcttgatggtgcatgtgactttacgttcctgccttgactttccttcaatgatggatcttagcctggagttgtaagtaaggtaaacccttccttcctaaattgcttttgtcagggtttcatcagagtatagatatgaaactagaacactgaggaagctgcacgttggtgattcattgacaaaacagatccaggaacttggtggacatgggagctgtatgaggggagacttcagaagcagcaccctccactgagtattcccagaggaaagatagagacaggaagagagttctatgaaagaagagcacccagtggaccagaagagctcaggaaaataatgaatactgagcagataggaggtgtagagatagctgcagagatggggtgcccctttcagttactcttctacacttagtggactctaccccctgagacccagagaccacaagcatcttgtgtagctggggcagagtccacacagctgggaggggttgcaggagaaaatggctgggatctcaggtggaagttccgtgtaggaggtcacagctattctcatgaaggtggtgatggctgttacccaggtactgctcagaggacagggctccacagcaggagcagtggattctggagctcagacgccattctcctaagggctcagcctgagtgtctaggactgtaggagcaggtgccataggacacagcactaagcctatctcctctgtctgtctgtctgtctctgtgtgtggtacatgctcgtgcagttataagtgcatgcttgtgtgtgcatgcgtgtgtatgggggcagaggaggatgctgggggggggggcgggcttgctctgtcattccctcctttgttctttaatagtagggtctgttctagtttgctttcagttgtgataaatatcatgacccaaatcaactttggggaggaaaagttttttttggtttgcaggtaatagtctatccttgagggaagtgagggcgggaccttggaagtaggaactgaagtggataccatggaggaatgctgcttactggtttgctttcatgacgtgaacagcttgcttctgctttcttacatatcttaggaccacccctctagggatggcaccacccacagtggactggggcttcccacatcagttagcagtcaagacaatgtcccaagatatgcccataggccaatcctgatagccagttcctcagttgaggttcgtgacctccctggtgtctttggtttgttccatgttgacagaactaaggagccctgggtctctcactgaatctggaggtaggatgggctcacccagcagagttttgtcatctttgctccgtgctgggttaaaggcttgcatggctacacttggccttttgcatgggtactaagggctcacactcagggtttgtgctttcacagtaagggcttgcagattgctcacacaggctttgtcaggaacccatctgggcttgagctgagtctgcgggaggctgaggggtgagcagctgccacaggctgggacctaagcatgtagttctccttcctgtgaaggtggcaacatccttagatctctgttgccttaaaaaaaaacagttttgctttgcaatttaagcttgtctggaacttgttatgtagcttaggttggcctcaaattaccctccagctttaacttcttgaatactggggttataggcacagactagagtgctgggctcacagaacaaacttttctcagtgtttggggcctgtcctggtgtgggtacttggttggtaagcgctctgccaatgcagctacatcgccaacctggggtggtggaggaagctttccacaaggaggcatgagagttctccggagaccaagggactttaggcaccaaggctgtaacttcctactgagagtcctagggtgccttacagcttgtctcaaggcatgctgcctccagccaccacagtgctctgacaccaaatatataagcagtcctttcaatgcattgtcccaagcctcctgcctccatgtgtgtattttctagctctgcactccatcctccagaggatcttgagagaattaatgatataattcaactcaaagccatgtcctgctggtccttgctcatcttcccccaacccttttttgtggtactgaagatggaaccaggtggtgcacataaacccacacaggttgtgtgacatgtacacacacacacacacacacacactttctaaataaattcagaaataaatgaatagacagataatcttctgttttgctttgttttgagacagggtttctctgtgtagctctggctcttgtggaactccctgtgtagaccagcctggcctcccaagtgacggaattaaaggcatgtgccactattgcttggctatgaataaaaatcataagtcttaggggttgaggagatggctcagtggtttagggcagttgttactcttgcagagaactagagtttcattcccagctctcacacgaagcacttcagaacagcctgtaaatctggcttgaagctccaaggaatccgatactctcctttggcttctatggtcaccttcacacctgtgcttgtacatatactcacacatgcatgcacaaacacgttcatgtgtgctctcttacacatcttagggttgacttgatggtttgtcaagtaaaagtgcttgcttttaagcctaacaacttgaattccatcccagggattcatctagaggagtggttctcaaccttcctaatgttgttcctaatgttgtataatgtacttcctcatgttgtgatgacccccaaccataaggtcattttcattgctacttcattactgtaattttgctactgttataaattataatataaatattggatatgtaggatatctgatatgccacctccaaaggcgtcacgacccacatgttgagaaccactgttttaacacatgtgaccacatcccagcctaagctgtcggccatttgttctctaatatgtcacctggcacaggccttgtgccaagcttcctgttccttgcagcctagacttcctttgagcacttctgctgtgggaatgtggtcctgctttcttgtctgcctgcgttcttgcttctgagtgctacggtttctgttttctcttcactctcatggccatagggatgaaaatctgaggcatgttttagtttctggagcgagtatcataagtcaggatgtagctgtctagcttattcctctcacttatagctgggctagattaaaccagagttcagaaaggcaaaataactagcctagggccacacagcaagctagcgagcaatctgggctcacagctcggctctgtgtggatggagccgttgcttctccaaagttctgagaccttctcttccatttgctgttcagtgagttcaaagtgagcacctcactaatgatggcgcctctctgagcctctgcatccaccaagtcctttgttcagccgatgcgtttgattgtttccctggaagccaggtgcacttgatttttaattcactcttccctctctgagagaagttctggtaggtaggtgagtgggtcgggagttctaaatttattataggaggttccctccccttctgtttaatattgaaagtcctgtcaagagtggaacaggggctggtgagatggctcagtgggtaagagcacccgactgctcttccgaaggaccaaagttcaaatcccagcaaccacatggtggctcacaaccacccgtaatgagatctgatgccctcttctggagtgtctgaagacagctacagtgtacttacatataataaataaataaatctttaaaaaaaaaaaaaaaaaagagtggaacaggttgataagccaacctccctgaagtctgatcagcgtccaaataagtccacttctgaccacacatccactgcccacagtggaacacctgtagaggacacagcttgtctcacctactattttgtccgtagacaccactatccagtgtaggtaagttttccatgctgaggtcattttgggtcctctatggggaggcaggcaaatttggcttgttcctaggctgatggagacctgtcagtccctcccactcttgtctacattcctggatgtggacattgtgaggagtgcatgcactcttcaggatgtgtgggatgtgcttcatgcctctccctccctgaagtttgtttggggccagagttttggatgttatagcatcagccgaccagctctttcagagcaggatgcaggagaggaattgaggcatttgtttgagagcttctgagagctttttttagtgtgaacagttcaaagaactcctcttgttaatcagaggaatattccagcatccctggggtggtcacactggcttaattggaacccaggctgctttgaagtccttttaatccttcctgagctgggagaaagaatttggaggcagcaactgtaaatttgaaaattcttcattttatttacatgtgtctggggacgcgtggaactcatttccctgaggcagttaagctgtgtttccgactatggacagttgaatgggatgtggacattaggtggctggtatgggattgctgcagggcattgggttacttaaaagtggcagcagtggaccctggtgccatgggccttcttaggaagtgtgctgtcttgctgctggcctccagatgccatggccaccggccatttattctgctccatgaagaaggggcattagccacccagcagagctgttctcccacacctccttagttgctcagaggtggattcaggctgctgggtcaactagacacagcaggacaagcactcttggttagctcttcctgagctgtctagggttagttgtgatttaaaaaattaaaaaataaaaaaaaaaaaaaagaaagaaaaggatcttatatggtctagactggctgtgaactctctgtgtagttacaaatgacttcatggcattaggccaggtttatgcaatggaacttaaggcttcattcatgccgggcaagcagtgggacaaccgagccatgtccttgctttgtgtttgcttctgagtcaggtctcactgtatagcccaggctgacccagaactcatgactgtcctgaagcaagcttccaagttttgtggtaggaggtatttttgaaatttcattcttatgtgtgctcacttgcttttgggcattctctgtttctgcctgttgtatttctgtaggagtgctgggataacagatgtgggtgccactgtgtctggctattatgtggtcctggggagtcaagctccagccatccagccttagtgaatcactttacccattagccattgtcctagcctcagagccaccctcctagagactgttcctaaatggcttgtcaagtgatcaccttactttagtcccttttcctggctggactatcactgtgctcataaaggaaacattttacacattggttttgtcccagtgatcatcagccccagcaggtagtgagtgtctgtgactctggatggtacacgttctgtcaggacagtagccatggtctcaggatgagctacacacagcactcctagatgtgttggggacagggccttggtttgtgtatgtcaggctggcatggaacgtgattggaatcctcttgcttcagcctcctgaccacaggctaagctaccatcctgataggaggctgctccctcctccacagagcctgtcagtcctcacaggtaccgtgctgagtcagagctgacctttggtttggtggcagccttccttcctctctgttatctgcccaccagcctgactcttgatgattttcagcctggttctgtcacttgggaagtagaggcagtcagtctctgtgagttcaaggctagcctggtctgcatggtgagttccaggttagccaggactagatagtaagaccctgttctcccaccccctccactaaataacttaggtacatagatttttgatttctcttttaagcaactttaaggatcgaatcacaagccttgagtatttagataggaagccctactctcagctagctcatgcactcgttacaccccccccccccccagatttctccaatactcctgtaatggcctcatttgtaatgcaagtgatttgttatatgtagctgaacctcatttaagaatggtctgattgcttggttataaatggttatagttggatttccatgtgttaatttgtcatgggaagggcatgtttgcttttttttttttaagatttttagatagcacttgctccataaggttaagagctaaactttgaaataagtagccattggttacctatcattgaatttattttcatggtacaagatatttaagaagaaatgggtgaactggctcggcatgtgaaggcatctgccactaagcttggtgacctgtgtttgattcctaagatctacatggtggaagttgtcctttggcctacacatgtgtgctatgtcacacaaccccctaataaacaaataaatgtaatttaacaatatttaaaaagcttacaaacacttggaggtaagtttcctggttatttttttcacccctacaggaagccacttctgctttttcctttggcccctacacccttatatatgcaggccaacacagctatgcttaatttttggtttattcaaataacacagtgtattcacacattctgcttctctcttatgaagtaatgcatttttgtaggtctttcattcatatgtgtgtacgtatgtgtacatatgtatatatttacattttatatttatatatttatattttcatctagatttcatcatctaggtagactgtaatttggccagtaacattgagcctgcttttgttttttccagtgtttgggcatggagtcccaggcctggcttgtgtgagcaggcataatctgccacaccttcagcccagcactgagctttttttttttttttttttggtatgcttgtttgtttattttttaaagatttatctattatatgtaaatacactgtagctgtcttcagactcaccagaggagggcatcagatcccattatggatggttgtgagccaccacgtggttgctgggatttgaactcacaacctttggaagagcagtcggtgctcttaaccgctgagccatctctccagcccagcactgagcttttaaatccagtatcttgacttcagattcaggcagaactttgctgggaatatttttctagaaagcgctcatgggttttcattcactatctgtttggggtctctgcagtgaagagtcagaacagagtctaaggtgaatccctcttgggacgctcttacctgatggagaaagatggcttggagtgtgtgagtctgggctttgggctggggaagggcaatggtgtaagcaggaccctgagcagcagggtgaggtggcgaggctctcagtaaaagacaggacacctaaagtgacaggagagctgtgtgtgcacaccacaggagaagcagccctgggaagggacatgaggggccagaggagggaatgtggtaacagctgtaaactggaacagcatctgtcttcctgtcccttcctgacctggccatctgtgtgacctcatttccaaaaaggaggagggatgtcatgtgacaagggctgctgtggtcctttgctgctgtggcaaacctctgtctgagacagcagccggccctgctttgacttccttaggaagaggaactgtccctccctttacatgctttgaactggtagctttggagggtagatgagtcataattgcccacttcatggtcaggctgccatagggtggtcctgagctccaacaacaagacagacttgtttctcttgactgtctctagaatccttagtggctgtggccttagaacctgataatccaacactgctgggtggccttagagctgtgggcagcaggcgtggccactgtaggtagctctgtagtgcttggcacagcccacagctgctctgcagtgctgacttagcgtgatgtgtgcttgtccccatgtcctggaccctccgtacagtggcttatcagtcccaggcctgcagacctacatcagctggagaaatctgatttggagtctccatagctgtgagtgcccatcctttcagcttttagcagaagtttttgctgtctaatgtgttctgctctggacttggcatactttttgcaagaacaataaacccagctccataggggtaggggaaggccgtgttccctccttctacttccttttcgattgggccctggctgaagcccagtccctgcagttttggaccatagtctcagccctgtagcttcctattctctggagagaatggcaccttggaagagagctcatggcctggcgtttgctaattgggtctgtggctgctgccacttcattcattctcgacattggtatcctcgggattgggtgtctttcagacattgtgaaaccagcacttatagcttcagtgagagccatggcacctgctattagaactcaaaatagccatggttggggctggaactgtctttgcctcagaaataaactagcgggctcaggccgccggcattctgtgcctgcagctgagtttgtgtcacaattcagctgttcacagaacaaagagacctctccccgagagcccccgtcagaccatgaaaggctgcgcagctgaagccacggttgttcggcagcagatgccacagcttgggctgcagttggaactgtcactcccctgtcatccatgtgttggaggccccagagaccctgagtgccttccactttgtagttgtgaagtgcgagtgtcacgctcgctggaccggacaggcagtggtatttttaggccaaagtggcactctgtgggacgccttgtagttgaaagcattttgctaatccctcgagtgccgggagcatctccgagcagctttagcacacaggtcaggaggctcctgaagcacagacgcttactcggccagcacctggcggtccacgggctgtggacaaggcgaagaccgcgcctgtggatgagtccccgtgattccacagctctcgaaagccctctcccatgcctacgaggctccacataggtagcacagttgccacctaccctcacttcctgtggggtcaagctgtctgctggtctctgtgccctcccacctcccagtacagcaattaaaggtgtgtgccaccaccacctcatcttcccagggcttcttaaggattgctccccaccccaactctctcgagtgcccttcatcctatgctcttcagcctggtgccagggctcatgccaggctgacagcggaaagctagtgccctgctctgagctggtgttcgtggcgcctttctccctgttgcctttattgtctcgggagggatttatttatacatatgtactgcggattctctttaggaattcacacagtgcatagaagacaccccccccccccccagttcgattgtccccaccagtttgggcaagcacagttcactgcgtcacattttccactagggcacagtctatgaataaaggaataaacatactatttactcttatgtatgtaactcagccacagtcagttcgtgcctggctctttctttgcacgtcctttgcctggcacacttgtttggccttttgtcaagaacaactttttagcctccttggatcaccagatgatccacaggtgaggccttggggaccggaactgacttttcatgggtctacaagtggatggcccagtgctggtgaatgttcatcctccgcctctcagtggttgcttttttatgacctcatgttgcagagggggggaaggagagaggttctccatgtatttgtctttggtgttggggttagaacatatgcctactaggcaagtactctaccactgggctgtctttccggccccttacacagggctgtagtaaggtcagagttcagtccattgcacagtgaacaattggattggtagctcatttgcacccaggactacccagtgtcctgctcatgaggattgtaggtctttgaggtagcaaccttttcctggctcagtgtccgttttttgtgctctcccagactgacctaaagcccgagagtacagtgtgagcatacaggtatgtggggtgtctcaggtgctttctgtgcatctgggctcaaaccttttatcacacaatcacacagttagagcctgcctttttgggtgaagctgtaggaattcccaaataagtgggtagtgacttcagtgtgccttgtgctcactgtggccacagttgatgaggaaagcagacccagcgtcaccatctgccctcatgtgtatctgggcatgttcacactgttcttaaaaacaccatgaaattcagagtatgcatcctgctgtgcaccagtcacatgaccaggcccacctcgagtctactcacactcatgggtgcacccaggcggtatctggctgtcagttttctcactgaaaattgaaacaaaaagaccaggtctgttatggtagactgataggtgagtagagcattttggagagctgggaagcatgtacatgcatagcaacccactgctgctctttccttttgctgcctgatctgcagaagcagctagccgggtgaggtcatctgagccctgcctttgtgccaggccgtggctagtgctctgtgcatcttatttcctaggcacactggtactgttatatagtcttcctatttttagagcgagaataaagttaaagctcttgtgtgcatgcctgggtacatacacatttagatgccagaggtcaagcttgggtgttgttccttgatgccatccaacatgtgttttaggtaagagtctctcgttggtcagagactcaccaagtaagtaaggctggccaggaagccctaggtatacacctgtgtccatctcagcacggagcaggtgccatcacatctggctttgtatgctcttaatatgtttaattccattttgtttaattagttgtatgtgtgcatgtgtgtgtgcatgtgaggctcagaggacaactctggaattggttctgtcctttcatgtggagcctagggattgaactctggttctcagtcttggtgccaagtgtctttttacccactgagttctaaacatgacttctgggaactgaatttgggtcttcaactgagtaacctccatttaggagtcagtaaggcttattttgaaagtagtctatccaccctccactgaggtgcttggacctgcgtgctgtgagtacttgctactctgtacttgggctgcagagtgaacttccacagacctctgaattgacagtggatggtgtggcttttggttttctgttttgtgtgcacaatgtggcccatttctggggagagaaggaactaagtgtgtcttctttacccatcaggactccagaggacctttctaggttcgtggttgagctacagcagcgagagctcaccctgaaggagaagaataacagcatcaccagcaggtaggtggcctgggggcatctgacagtgtgatggctccgggcagtttgagtactgcctgcatgccttcctctttgtttactagtctgttttccattactgtttcatagtacctggggctggatacttttcaagaacttttttctagggtataatggtggcattattcgggtgtagctctgctaaagacagctggtgataggtttttgggtagtgcaggcttgcttgatataggagaaggctagaggggaagggttgggtttttgtcttaaccgctcttttgagcactagccaagggtttctgagagctgcctcagtccctttgaaggtcagtgcacttggtgacctgaaggcctctcacactacccacatctatatatgagtgctcctggcagactcatttattaactgcgtgcactcaagccacagtgtcaggcgtggctgtgcctcactgctccatggtctgagatgtgggagtagttgttacctcacatgccacatccagtgagattctagagccactctgcaaattctaatttaagtgctgttcaccactgggtccccttctagatctggagccttgcaacttccaggcagtgtgtggatctggatggcctctggatgcatgcatgtgtgatgtgtgcagctttgtgtgctcacagatgtgaacattctaccagcctgtgctcttgatcacaagtgataacatctcaccctgagatgagcagtaggtgtatttgttccgcagtccagtaggaagtccaggggcagcttagaccctgccgggcctgccgggcccttgtcctggcaacaccacacacatcctgtgtttttctagaactgctttctttccaagccctaaacagcagtgtgctttctgcttctgctctgacagtaggttctgttcagacagtcacaagtgtcaggtccccaggtcacccacattcccatcccaccactccttctcaggctcagggattttcagaaatcaggagagtgtctcccttgagactcctggtttcttctgaagaatccagcccaggagcaaccggatggtggcatttcaggcagggacatagctttcttcagttaacaccccaccactaccaccttgatgcatacatcaatctccatgtattcaaatcctattgtgaagggtttcacagcccagctcccaagtcagtggatggggtggactttctcccctctgctttccagtctttttgtgactagctccaacctgagcattgtgggacttgtactagcttatctcattagcttgttgcgaatattagcagacaggcctgtcacccagtagagcccaagaggtcttagggctctgctgggaaccagagactgaaaccaaacatgtttggtcttctctcacattgggctgggctcttgtccatttgccctgtggctgggcacttggccaattttatgatttttgaagtgccttcctaggtctagtcttatgtccagagacaaaaaggaaaagtcttctttgagtgttaatggaataaagaaggcttttctgtggccaccatccacctgatccccttcactgaccaaaactgggctgtgtgcctgcccagaccctgtactgtcagaagatggagttgccatagtgaacccaaggtcatcccatgtgtgtgtgtgtgtgtgtgtgtgtgtgtttatatgtgtatgctcacgtgtgcgcgcactacctgaggcaagtgtgggctcctgcagagccagagggaggaaagtgtacagccaccagggcaagagcgcctagtgccccagtggactgacttgcatggacaggactaggaggagcatggagccagcctgttgttgtgggtgatccaaccgtagtcttgtcttcttagggagacagcattttcatcattcattactagccagaaggaggggttctcattggagtgctgatgtcactctgaaaattggcttctagaagcatctggttatgttggacataatcacatccatttacttgagaaagctcacatgataaagattgccttttgctttcaaagcctctgtcagatgaaacgggcatgaaaagtgatttggaattaaagcttgaacgtttgccgggtgatcctcttcattttcctctgactatgaaatggaatgaactattcaagtcaaggaaacctatctgcatttccctcgcacccagtagttagctgctgtgaccaggcatgctaagacccatgtctgcccaagagccacgagaaacgggccactggcacacctcccaatgtacctggcttgtgtttgccagtttgggttgagtcagcctgtggtttggtttatgtaggtttgagactggagtcttggagtagcctgtgtcaggggcaggcagtgctggggagtggggaggttggggtacacctctaacctcaggacatcccatggatgtacttgtgttttgctttcttctgtagaatgctgaggtccctagttagcagatctcagacaggagaggcctggtccacagtactgtctctggtaatgtttttacaagatggttgtgtttgggtttcctgtgtgctggccttctgtgcctgggttcatgtgggacgtgtgaccttttgttctatgtggcttctgtagcctggacacagacttcttgtggagttggctaagcactgcctgccttgtgagtctctcagagctaggctgttgagctgaggagcagagaggcaacagctgtggtgctggggctgggttcacagggctcctcactggtggactgggggcagaggctctcttagtaaggtgggaaccggtggttatcgtgaagtctacgcagctcgagccttgaaactgagatggcctaggttaaggtagttgttattttgctagtgaggagagtcactcaggagatgagctgagacgctatgtttccagcctattgtatgctaggtcatggttgtgcctttccttttaatgcaggttccagatggaaccaggtggctagggtggcactggcttcagtggttggatggattattgcagcttcagcacttcagcccttggggcctgagcttaaaagggcaagtttccaccattttgttcatgggaccaggagacccagaaaggccaagtgtttttccttggccttttaaagacggttgggcagatttgaatgaagtgggaaggagagagcatggtacatcctgagctgcagagggcatcacagggtaggccaggctttgcacagagggagcaaggcaaggcaaggcacctgttttttgtttttttcagtgtgtggtgtgtagttggggaggagcagaccatcagaccaccccaagtcatggtgtcgcatgctgaggttctggtcgtatttcacagctatgcaggccagtggcctgcactcccatcatgctgtgtccttgtccaatgttctagcccagctattgatcatgtctgaatcttgcaaacaaatgtttgctgcttctgtggctttaaaacatgttctttattacacccctagactgcccactggctgttagaagagagattttgtgccccctgccctcctgcccccttgtttctgctgtgaagggcatggcagtacttatgagaacactcactcaagtgtgtagcacctctccaacctgtgcatgagtcaactgtgtcttctgccactggctgtgttagtaagtcggtgtcagcgacccatgcctggagaccagagagtttctgtagagctgcctctgcgaagcactgaggaactgctagagttgggcctttgcctgttgctgtagttacctcagtaggccctggcatatgtggggcagaactgtgcctctgggaaggctgctaggcagggctctgacctgagccctgtgtgggtgaggtgccggactgtaatgtgcctcattgaaggaggctgagccatagacatcatctgggtctaggaaggccagatgaagtcacaccctagagtttccaaccagccaggagcagggaaagcacctcctactattgagatgagatcaccttgatccctagctgggcaggcaccgctctgaactcattagactgaaacagtcttttgttttttttgagatattgtctttttatattttctaggctgatctggaactctctggagttccctgtgtatcttgtgctggccttggactgactgactgactgactctctctctctctctctgtgtgtgtgtgtgtgtgcgcgcgcgcgcgtgtgttatcccattcagctgaatttgttcctttgtttgtttgttttcctcttttctctgagtgtttaggtgaaagctcagaggtgggactggcatttccatctgataggagactggtgtttttgagtagcaggagatgggatgggagatggtagtcaggagagtgtcacagggatatatggatggaggagggatgggtggacgggtgatgtgtcctgtttagtaggtgaggaggaccagggagccgttgcccaggtgaatgtggcctgttgaagtggagagtatgctctgcagggctgtgttggagactgtgcccaggcattgggtagctctggttggtgaggacaggaggggggaggttcctttgcagcatgtgtgcagcgggggttgggcagattcctgcttggtgggtggcttgctagtgggcaccagtatagggaatcctccaagaaggtgttggtctgtacattcccacggtcggctgccgtgagccatcaggctgcgcctgcgctcctcctcacccatcccgcacagctcacaggtaccatcgatcatggatatggatggggctgtcagggcctgccttgcatcctcggtaccttcggacaggatctgattacagtgtcaggaaccttgccctcttcggtgtgccagccttgctttttgttctgtagggctgataatgcctctcttggttttgtggctaaggagctggcaggttgcctggggtgtatgtgtagatcttaggtgtgtcctctgttcagtatctattgcattgggctgaccagcactgcccaaaagacccctctgctcttgatggggctctttagggtcaggagttcaagggcccaggtaggtccccactatgttactaacttaccagctttctgtaggttgtgctgaagtgctgtgattgagtgtcaggcaggcctgggaactccattccctcattcatttgcagaaggtgagtttgaaccctggtggatctgcagggagtcagtagaaacagaccttgagcctagtctgtcagtctcccaagcatccatgctacggctgagtttggagcccaggtctccaaggaggtcctaacacaactgctctccagggctacttcaagtcgtaggctggcaccctctgaaatgtttatgtaaggcagggccactgaagacaaactgtgtagtgatgtggaacgtgggtgcagatgtttcctcttccaccctttcctgtccactccctccatccaggtcaggacacagggaagcattcactctttttctagccagctttcatgaaccatgtgctcagccccagggctccattcaccatggcctcaccttatgcctgtagtccagaaggtcttctgctgctgggcagagcagtcatgcctgcagtcatggggcaggattcgggggtcaggggcagacatgttgagtctgtacgtacctgtggtccgggtctttgctgaaccagtctgggcctctttgttgaaagccactttcctcatgggtgaacaggcacgtagcacaatgatgatgccacaacaccatacctacttacctagcagagggtccttaaggagaaacagtacatggagggtataacccatctgggtcacaaaggctgtgccctgactttctccattgcctcccaagggcggttaagctcagagtctgagtcataattcttgcctgtttgtctagagcagttaggcccccctctcacagcatcttgtagtataatgaggccttgtcacctgtgtgagcctgtgtccacatgagttatagtgctctcgagctgtctagaagccaacaaagccagtgacaggtgctcaggattaatggtgcggggacatgttttgtgtctccaagggggtgtcatgctgtatcctggagctgtgatggggaagccattattgccggctccaaactcaggctgcctgtgtttgaatctcagctccactactgaggagcactcggtccttggacagtttaattagcctgtccacagtgaagacaccttttcaggtggggtgtgtacaggagggtaaagtatattaaaggatgtagccataaaggatacaggctagtgtctggaacggtaaacaaggggctggccagcatcatagtcctctttaatgccatcctttgtgtatgaggaaccacagtgagcagctgctaagatatgatggtcctggtattggggtgttcacagtgggcacccctggaagatgagttttggtagatgactgctggtgatggttagagggctaggggctgggcacgtcttcagtggagaagatgctgaaatttgttatggttgattgggtgggcagaagaagagcagtgagtagcccatctcccatggctgtgtcccctgccaggtcttatgctcattccagccatttactgtttgtgcatgagccagctcctgggcctgtcaggaacacaggccaaggcctcaaatgtctgcctggttctttctacccagtatgaatggtctttggcagagcagttgagccagcttgcatctggtgagctctctccatgtgtcctcaatggtagcccctactatgtattttagggatgctgtgggacctgctcacactgatcacatgcctgtcctcagtggctccaggtcaggctttaggggttgctggtcgcaattcatatacccctagagacgtggctggggtctctggaggaacacccctagaacctatactttcactcttgggacacagggaggaaacgtcccctgtagctcagggcttcttgttactagtagattggctgtataaatacttgtttctgagctgactatatctaggctccttataggcctgtgggaggcttagtttgttggctgaacttcctggcttacagtttagtgctaaggctgagagtatggttgcaaacactcgtgtttctaaaacccagccagggtggccctgtacagctggccagacagactgacctgccacccactttctgtgctatggtctgtctataatggcccacagtttgtgtcctagctcaggtcttgctgaggtgtttgtttctttcttccatgctagaatccatgtcactctgtgtcattgcctttgttaaagtgacaaactatatcattcttttctacagttgtctctagacatctgctttccacgcagctgtctgagggacactttctgactcaggtcacgccatattgtccccacacctgagccttcccctggtgctgtgtcctcagggtgtgcgcagtttccttgccaggttttcaccacagcagcatcctctgctgctgctctgtgttgtccggggtctgtgcaccttctctaggctgcctttccacctccttccccaggcattattagcatcatgttcttggccttatttcctctgctgacttggcagacccatcaaagctaggatttttgttaaaatgaatatatgtttgcctctgtctaactctgcctgtgctcctctgcttgtctttctcggtgcaaggcttgtgctggcttttcttacagtgagccaaccattatccccaccatagcacatgctctctgcagctgaggtggaggagccagcaccattggcaggcccacaggcccatggatttggtcctccctcacatcttagccaagccatgaggttattggctgtatatgaagcccagcaggagccctttccccactagcctggactagtctccctgtctccctccttggctgctctgcactcagtatcatctgaggtgtcccaagggtcactgcctttgtcccctcttgtcccacagttgtgtggactctgaatgcacttgcttctgtcctcccaacctcaagtggttgcacagctctaagatgtgctatgcctgtccacacaacttgagggcttctccccttctcaccactgcaccttggcctctcatcttctgtgggactgtcatgacctcccaagttcccttcctactgtctcttcagttcccttctttctgtcccttgtcagttcacatgctcctttaggtagggcatttctcccaggttccacgttgcatgttgttgggtaaggtgtcttccttaaggagacatgaacagtcatctatttccccccaaagggagcatcagtgactgaccaaagtaacacctccacctgcctcgcctgtagagccactgagttcattgagctccttatgtaagaccatggtggaggggcacttacagaagcataggtgagccccacgtgtcaactggaaatccccatgccagcatggaagaagacagctgcatagctgcatagctggagttgctacggcacttgacactgcagacacttccgcatgcctccagtacctctgagaccatgagcagcagggacagaattacaggcaggtgggaaagggggtcgaggacaggagggagggactggggtctcaggatttaatgatcctttcctttttatgagagagtatcagcaggcctgtctcttttgggggcagggattcaagacagggtttctttatgtagccctcgatgtcctggaactcattttgtagaccaggttggtcttgaactcacagagatccacctgcctctgcctctcaagtgatgagattaaaggcatgcgccaccaccgcatagctagcaggcctgttcttcagggctgtttgtgagtagtcacagttgctgtggtatgtatggtaatggctgctatggtgactgtgtgcccggtatctagttcattcccaagaggtatttactgagtaaataaagttcccatcagcttgagaatggggtgttgtgatggctctggcttcttagggacttgtggtgttgtctgtggcttgtaagctcatctttgtctcccttccctgctgtcctctattctgtcactttgggtccctgtttttaccaagtgtggcagcagcagagctggggacttagtgccttgcattgcctttggctggtctgcaatttggcaccagtagtgtacgtagcatctgtcagctctcagccacccccagcctacctgcttcagcctagggtagctgaatggcttagcattataagtatagcatttgattggaggccacaccctcatttctgttcagagcctaagcaataagctgtccccagtttcctctcatgtggtacatgggaggcattctgtgccagacctgaggctgtgccaagtgggaagaggcagagttccattctggtagggctttgtgtgcactgggcctcggcacaggtctggcagtggcagtgttgggcagcaatggtgtcaccctgggccgtctgcagagacgcagggtgcaatggaggcaggtgagggggcaacatataactatgcatgatgagtgcccatgcatgtggggtgcgtgtacttgtgtggacagggacaggtgtggagatacagaagcatggaacttgtgtaagctgtatgcattccaccggctataaaagttgttgagggaacatttcttagcagatgctaagatgttttgtttagatcctgtaataccagaactggtattaagcagcttaaaatttgccttggaatgtggagagtggctacctgagtctgagcacttttctcatgccttctgcagcactagtgacatagagctcatggctgtcctgcaaggagtatgctgctcttagccacctgcagacccaggagtgcctggctaggactcatggtcgtctgaggatgtctgactctatgcacgtttacctcctacccacacatctacctttcccttccttgtgacagtgggctctgtggcctttctttggaagctggagtggctcagcagggaatccctctatcctgattctctttaacttttttttttttttttttttttgagacaggatttctctgtgtagccctggctgtcctggaactcactctgtagaccaggctggcctggaactcagaaatccacctgcctctgcctcccgagtgctgggattaaaggcgtgcgccaccacgcccggctctctttaacttttatgtcaactgtgggtcaacactgagcctgcctcccagaaccactcacatagtaacctgggcatggctatgcaggctgcccacaccaaattgatctggtcttgttatatcccagactgcagaatgcactaggcattgtggtatttgactaatgggctagtccaagctcaagacagtttacctaccaagtaatggctcctacttaccatctcttcctctgatatccctatcagacaaaggctttgagcatggctgtgtagcagtgttttgttagttcctgtgtacaggttgtcaccttccatctggtaagttcaggttccatagaacaggcccagagtgctgctattgaggtttagggacccagtgggctgatctctgatactattcctgcttatacagtccccttatcacactgtgttctgaaggggacatgaaggcaggcaagtttaactggaggctcccacagtgcccaccatagctgggaattcctagcctctctgtccgagcctgatccccaccccctttaagatacccccctcttcttgcctgtgtgtgtttccttccttccaggaacagaacccaatagcactgtcaagagctgtctgtgcttgagccgggccaggtttatgctctgagcatagggcagcttcagaaggctttggcagctggctgcagtgcccagctttggacatgagatggtgcctgcagcatttcgagccctatctgctcactcctcaaagcttccttccatagcctccccagtggaggcatccaaaccaagtctataaattttgtgaccagttagtaggagagagagtggagagataaagagaggctggaaagaccttgagatgggtgggcatctgtcataggtgcctacctggagctcacttctgctcttgagctgtataatctttaccttcccattctttgctggggtgggctggtgagtccaggagggagggagggagggagggggagtacagggggggggagagaccgagagagagagagagagagagagagagagagagagaatgtatgtgtgtgtgtagtgatataagccccaaccctagcttggctttggctctgtttaagacattcctgtttcaggctgcctctcttctactgctttgccttgagaccaagtctgggtacccacatccccaaaaggatggccagtgcatcctgggatacagagcaaggcttgggtcctttactgaatttgtggagatacacagctgtgagggtgaaaggccccttgatgataggccctgtgtgtggtgggaagatgtgcatactccttcttcaagggccaggttgctgtgctccaggcctacccagccccaaccacccagtcatggagttggggagggccagcgttccagacccggccctcttagtctgcttgtgctggctcttcaactaggggagctgcggttaacatttctcacccacacggactgttgctctgtatgtcttgcatatccatatttaaaatggtatttacatattcatgggtttttaaataagctcttattgttaaggaatgtagaagtggataaaatgtgaaactccctcttttattcaagcaccagagaaaacgtcacccccatctaccccaatgcaatcactttctgagtgcttagctctgttgccatgggagctgccctgtcccatggtcctctctcaattctgcccagcccgtgtccagcatacagcatacaatacacagcatggctcacagcatgcccacagccatgtccttttcttgtcatactctggatccctctgatgtgacccttacttcctgatagagtcctgaagacaccatccccatttttcccctcattcatttgtatgtatgtgtacatgtgtgtatatgtgtgtacatgaaggccaagggtgtcttcttccattaccctcactttctgagacaatgtcttttgcttgaacctggagctcactgatttaggtagacaagcttctccagtgtcctgtctcttccttcccagcgctggagttacagacatccactattgcccctggctttttggagggtttcagtgatccaaactcaagtctcctgttcccacatcctcctgcccccccccttttttttggaagaaaaattaagacagataaagcttgtcgttttagaagtggcagagttagagatgccgttgtcattacgtgtccctgccttggcctcaggtactccttgttctgcagctggtgaatagggatttgaaggaccagtgtctttgcactttccttttctatagagacaagaagcaaccactcccttctccctccatagtcctataagggtcatgggccagacagacctagtaggactgccagttttacatctggagctgtctgagcctttgcttctgggatgtctgtctgtaggaagcccattggagagcactgtagacggagagagtggaggagccaaggaaggaaatttagtggactagccttggctggggtggggggcaagttgagtaggcattgggtaggttccagagatccatagaggtgtggctgtgctcttctggtcagtggctggctagcacgaggcagcggatcagtgcagggctctaaggtttgaacagtaaatacttggctggaagagcctttagggactcttaagaatttgacatcactttgacagaggcagacttaatacgcataatttcttgtctctgtcctttacatccctttcctaagcatgacatcatgtttggtcaactcagtgaggccttcttgtagaccatggtgtctgggaagcccaaggagacagcaatagacatgattgtatcagtagtagaaagcagatgtgcagaaaacagtgtgtaggaaagagcaactgagtagtgccatctgcattccacatagctttaggagtctctgctgaggctgtagcccctgggaaccgctgagcatttgacacccttcccctgccagcagctgcaggcctcacctgaaccgcttagcagcctagtcatgactggaatgcaggcatactgtggccattccttgggactcctttggagtggcatcactttgcctgtcaccagagggcagtgagagatgcctccctttgtcaatgactggaaggtggcattggccaggttactgttacctgagctgctactaactaggtcctttgtatagagaccctaactctggcctggcctatctggctggcttgatgtgagtgcactgcagttctcagggccaaaaccaagggaggcagccattcttgatgagggcagaagtgcttgctgggtttagggctgggcagctctcttgctttccagccttggttacagacccatgagcctggaagagggttgtcctgtggctcagggtcccagttctaagcactcccagctcaaggccagtctttgcttggctgttagtgcccttggtttgaggctggaatgagtatgctccatatcagggcatctgtcatatgcctctgaggggtctctagggccagctgtgtagctggggagaatgggagctgtggctcataaagggcctgtggagattcatgacccttagatggcacactccttgtcttccagccagtccctgtggccatctgggtctgaacacgggcctgtctgttatctctgtctcacagtgtcccattgggcagtactttttcaagccagatcagtcaaggctttctctgggttatgagacctccattcctgacagttcttaaaacctgggccaatagacacagttttttatagagtgttggtgttcctgagactgggaaatatggcactggccctcgtgctatcaagcactgctcattcatgagccagcatgagatggaggtggcgtgcagtagagctgtgatccctatcagaaaggagttccctgtgatgtggaaggataaacagaggatcagtgggaaggctgggaagggtaaacttgggggtccccttcccagcaatgcttccttcacacttgccggtcccacaggttcccacctagctgcttaaggagaccgtcggggagacagctgaggcttcatcaaggcccagactagttgcctttccctctttaccagtgcacttgagttgcagcagagaagtggtgggcacattcagcttgcaacccttggtcccgtgtcagtgctgtttggcatctggtttcaggaacccagcatagcagtcactgaagacaaagtatttataattgagacttgcatcagggtttatcttttttttaaaattaagattattcatatatatatatatatgtgtatatatatatatacacacacacacatatatatgtgtgtgtatgtatgtatgcatgtatgtaggtttaaataaataaaatatgcatgccaggcatggtggtatacacccttaatcccagcactcaggaggcaaaagtggacaaatcttagtgagattgaggccagcctggtctacatagtgagttctaagctagccagcagggccacacaaagagagacctagcctcaaaaccccccaaaaaaatggaagaacaaagtaaaacaacaaaaaacaacagcctttccccccaaaaaaccaacacaacaactttaatgtgccaagcacaaacacacacatataataattaataaacatatacaattaatatttatgttaaattctttcatttaaagtcacttattgtctatgaatatataaagtacttatgtatcaccctgccctatcactcttgcttatctcccttcctctcctgttgaactcaatgttctttgtagttagcacctgcggcattctaatgtctttactcttttctttgtgacctactgagtttgtcgagtgaggcttatttactggagaaggacaactttgtagtgtatagcactgaaggacatcaccctctcctggtgtagcagttacttttctgttgctgtcgtgaaacaccacaaccaaaagcagtttatggaagactgtttattttggcttacagttccggagagggtccatactggccagagaggtagtgcaaagtctcagtggccacagcaggaaggcgagagatctgtctcatcttcagttgtaaacttgaagtggggcaaggccgtagactctcagcctgtccccagtcacttcctccagaaagctgtctcctaaagtctccacaagctctctccacaacatcatcactactgggggccaagtgttcaaatacaggtgcctgtggggatcatttctcatttgaaccactgcacccagcagctgtgaacggccagtttctccttagggagagtcgagacctcctaagtccctcctccatccataatggattgttggctggtccaatctgggcccaatatctgtgtgtgatcgtagctgctatgtacttataaccgcaacagacatgtcattgccagaagtctctgttccctggcactccaacccttccttcagcctctgcattctcttttccccctaggaaggtgtttccaatactctgccaggtttagtgagaacagtgatgtgccacctcctttacgtttggttaaaggtgaagcactggattcccatgtctgcctcagcgatcaggctgctgtagtggtctgttgaaatctggtgactggggggtgtgcagcttgttgtagtatgaatatggttgtgatgggctactgttctctccccctgcctctctcccctcctctgtgtgtgtgtgtgtgtgtgtgtgtgtgtgtgtgtgtgtttgactgtctctgtctgtctggaatccagagactcagtaacagaagagctatagagcagcacagtgctttagatcagaaagcaatgatgaggtcagtgtgccaggctcagtgtgcaaactcagaaacagactgctacttacatgtatactagccaatagagagaaaaaggctgcgaatatgggtatagtcaataaggggagaattatgagtttgaaaaaaaaatcagagctataaatgctcagaaagacatcccatgctcatggacagaagagtcagtgctatggacgtgttagctctcatcaacctgatctggggtgcatcgttacctcaactacagtgctggaagttattttgtgagttgtgtgtgtgtgtgtttgcttgttcatgtgtgggtgtgtgcacttgtgtcttagggtgtaggagcacatgtctgtacatgtatgtggaggccagatacactcctcttggctttcactccttagatgccatccaccttatttcttgaaataggatctcttcctggtttggacaccaagcaagctaggctggctcctctgggggcctcagaggtctgcctgtctttgcttctggttccaagtacatgctacctgcttccttttcctcttcgtgaattcttgggattcagtttgaagtcttgtgttcctcagggagcactttacccactgagccatctctcccagccccgttttgagaatgttgtcacatgtagtttcttaagcctgtatgggaaagcaagagatccagaatagccaggacagcagtgaggaagattgaagggacagagcggacatctgacagcagggctgagtggggatgtgcagtgatgcagacagtatgacctcatggaaaggtggaagggctcaggaccctcaccagcacagccagctaactctgacagcagtgcaaaggtggctcggaggaaggagggactttgccacaggtgtcaaatgagaactcaatatccacaggaaagaaacccagcccaggcctctgcctcttaccagcaccaactccaggaggatcctaaacctgagtgttaaacacaaaacttgaaattttctgaggtgacaggaaagaaatctagctgaccttgaatttcatgttgactttcaacagccaacataaaaggcgcaatttctggaagaaataattgatatgctggacttaattaaaattaaaaattcttttttgctgactatattgccaatagaataagaagagagatcatagctggatgtagtggtgtacagacctatcatcccagctagtaggaaggctcaggcaagagtattacaagttcaagggctacctgggttacaaagtgtgtttaggtttagtttgagcaacttagtaagatcctgtctaaaattaaaacccaagcctttaatcccagcacctgggaggcagaggcaggcagatttctgagttcgaggccagcctggtctacaaagtgagttccaggacagccagggctatacagagaaaccctgtctcaaaaacaccaaaaaacaaaacaaaacaaaacaaaaaaccaaaaagagggctaggaatttagtgggagagcatcaatgtagaactccactgtgaaagattatggatatagctcagtggtagagcccctgcccagaatcctgtagtgaggggctggggtgtggctaggtggtagagctcctacctagaatcctgtagtgaggggctggggtgtggctcagtggtggagtccctgcctagaatcccccagtaaggggttgggggcatggctcagtggtggagctcctgcctagaatcccccagtgaggggctggggatgtggctcagtggtaatgtgtgacatgtgaagaagccaaggtccagtccctagtcttggggttggggttagggccaacactgactttcatgttgattttttaacattcaacataaaaggcacagtttctggaagaaataaattttggtaacactggctgttaccaaaagcccgcaaagtaatagacacagttcccattctttgctggtgggaatgtgaaatggtacagctattttggaagacagttttgcagccataaaccatgggaaactatttgcaaaatacatgttgaacaaaggacttttaccagaataccaaatatgcaatgaattgttaaaacccagtagtaagaatcaagttaacaaaatgggtaaagatctgagagtagactcctcattgaagcgagaaacagatggcaaataagcttttgaaaagatgttcaccatcacatgtcactagagaattgtaaattaaaacgagacacttccatgcacctattgaaatgtctcaaatccagaacactggccattaccaaaagcccgcaaaggaatagagttcccatgctttgctggtgggaatgtgagatggtacagctattttggaagatagttttgcagtttcttacaaaagtaaacatactttcaccatatggctcagcagttgtaccctctggagcatacctggatgaatcaaaacctgcatccacacagcaatttgcacagaagcagcaacaacagctttactctatttttagccccactccctcctttccttcccctctgtgtgtgtgttcatgtgtcattgtgggtacacatgtgccacacacgtgtgaagatcggaggacaacctcaggtgccagtacttgcatcctaccatgttggagtcagggtctttctgtcggtttccactgtgtacatcagactagctgactctcaggcttctgtggattctcctgtctctgcctcccagttccctgtaggaatgctgggattagacctatgcactaccaggtctggctttacctgggctctaggcttctgaactccagtccttctcttatttttggccagtgctttacccactgagccatctttctagtccagactttagtcttaactgccaaagccttagaagcagctaaaatgaattgaagaggtgactggatatataaactatggtataccccaaaagtgggatactgttaagtgctcaaaaaaaaaaatagactctaaagctgtgggaagacagatggactctcatactttctctaagtgggagtctgaggtttcgattgcaggacatattagaaaaagtatcacaatagcagtggctggtaagttgtggggagaagagggatgaatgaatagagcggcgagcgcacacgtgcgtgtgcgtgtgcgtgtgcgtgtgtgtgtgtgtagggggtgcaggccacaaccttctctactgaagcagggtctctaacttgaacccagagcatgttcccagttggacatgtctagctagccatgttgctctctgcaggatgactatgcctcttggcttctggagtttgtgcggcgctggcagacctttaatgttggagagctgcacggtgctcctacttgtgctgcaagtgcttgactgaatcatggagggaacacatcattccaggggagcatggctggctccaaggttctgggggattcctagggtttctgttcatttttgttaacatttctaactttctctaagtaataatgtccatctggacagaagcagattactgtctgagttcttttcttagttgctgtgaccaaatacctgacaaaagtgctttaagactaaagggtttgtcttagctcacggttctggggtactgttgaccatgccatcgtggcagggaaggcatggctgctaactgctggctgcatggtgtccatagtcaggcagctgagagtccagtgctgatgctcagctcccttcctccacatttagtccagaggaccgtgctgcccatatttagggtgagtgttccttcctcagatagtctagaaatttcttcacagacacaccccaagttgtgtttccatggtgattctgaatctacccatagtctacatgaaagtttatccatcataattactcagtaagacggggctagagaaagcattgtctcagtgttgagagtctctagaacttgactgtcagcatggagactcaaggatgccaatctgaatgtgctgacctgtccttccttagctttggcccagtggcctcttaactatatgggttggtccctatcatccttcagcctgtggttgggcaaaacaggcttttgtagctctcattgagctttggagagaacagattgacttagtgaccagagaagccgaagtgaggagctaagttgctttgcccccagcctcacttgtgtgtatatagctggaattatagccgggaggtttgagcctggggttgtgaaaaagtcaagtggaagatcaaatgtggatctggtgggttcccctgagccatctgtagtccaggcctactctgggtctagcctgggcctgttaactcaggcaggaagacgcttgcgaacatgttggtgggaatggatagggtttagactcaggcatctgctgacagtgcctgagcctaccatacaagggtcattggctcagtgaattccttgaattttaacagtctcttgtctttctgttagagagactttcagcaccttctcatttccacgctctgctaattttatggtcattccatattttcttgtcataaatgtaacagattttattgtgtttaaaccattttttaatatagattcccataaaaagctggaggagtgagaggcttgtacctcatcagaccttggaaggctcatccacctattttcaagcatttgggccccatccatggagcattctggaggtgctccttgtgttcttgcttagatatgctatccccagaggggctgtgctcttgccttttctaacagaagttcccagtgcataaggtcctatcaagatatatgggcttgtttgcaaatagactcacagagagggactggccaagggcctggggcacaggtcgcctgtcactcagttatgttcatggcatagagaatttatctctggccacttgggttgcttcttagccccagattgtccagtctgctcattcagctgtccccaggagtatttactggggaagactgtcagggtgccagggcttcctggcttatagagccagagctctgctatcttactgctcctacagtctcgctctggcctagaaggtggtgacatggttcacagtccatattaggtgtgggttccatgttgtacccagccagtcacctaagagttggggcactaactcaggcaagctgccccaagagtggtgctttgtgatttatctcggagatctctgactgtcttagaatttgttctaatcatatctcagtgtcagtttaaaaacattggaagatttttatttatctaattactccacatctctgtcactgaatgttgactgtcagcagacactcaatcacttctcatcacaccaaatggctctcctcaaagtctggcaggccattcacaaggcacagaactggttacttccaggacatggggatggcctttgcagtgtggagaacaggcagccttacagcattggctgggccctggtggttccagtaggctgcactatggatggccttgagggcttacagtcagtcaggtctgcttcactcaggtcttccttccatggaaggagcagagccactggaagtagggactcaggaagggagtggcatctcctctgtagtctacagcacacggctggctctccggtgggagctgaggtgatccagaaggtcaggcattcagcagggtgacatctagacccccaggctgttgatagagagccctgcccctcagttctcctggggaccagatccctggcactgggagggtgcttctgtcacaggtaggtttcagtgaccatgtggtgcctgtcatctgtcagaccctcctggcgctcaccccttccctggggaaatgttttcttcacagttcactggatcccaacaggacagcttttccgactcaccaggaccatgctggcagcagatgggacccatgatcctgagtccctctgtgctgcccacctgactgtccctctgacaggggctgccgtgttaagcctgggccctgtgttcagacaggaccttgagatgctttttttgccattctctgagctgctgctgctccagctgcttggaccaacttggtgggtgggcagagatagccacatttgtttttccggtctttgggaggaggcaaagaaccagccaggctatcatgtgtcacctctcagcagaagatgacagtttgcctcctgcctgccttctttcatacagttgtctcaggagggtctgctgggcacacggtcctttctcagaagaaatgcccaggcctttgaatctcatggtttttagccagtgtttgagaaccctcacatttgggctcagtgttggacagtgcctgcacagggaggagagcattgctagccatggttgcagagggagccccgaggagcctttgggtgtggcagcctgacctgtctgatatagtcccatagagaaaagtcttgctgctctgtgccttttaaaagtcaggcagcactcctctgagccccaccctggccttcctgcatgcatcttcctatcccttcacatgacaacccctgcccccacgttggctctagctagtgtcttggggctcagagattctctgagttcaccctcaggaccatagtgctgcttcagtcctggctctttctagccattgaacagaggcctctgggcctagagagctgcaagttgcaaactcaggttcctttctgcagagatcccttatacctggccccttcaactacaatacctgcagcacactggcatggctctgttcactgctgtccttccctcatggaagcatcgaacaggtaactcttggagaagaaagaggccacttgggtttccgaagctggaggcccacatgctggctttccttgtttattcctgtcaggcccgtatgaagagcacaggcagcacagcaggccagctcttcatggaggagcgtttttcttcctggccctgggagctcgtgggtcttcaggaagttctgtttgaacaggctgagggaaggctctagctgctgtgtcaagtgctagatgacggagaggcctgcagacaaggacaagcctacctcctagcagagggtacagtgagcatgctgagtagctgttagctgtccctgtatccatgtttgtttgtgccaggaactatctgctagacaaggtgcctgatcaaaccttcagccatcttggataaaagtggtgtgtgtgtgtgtgtgtgtgtgtgtgtgtgtgtgtgtgtgtgtgtgtgtgtgtgttgnnnnnnnnnnnnnnnnnnnnnnnnnnnnnnnnnnnnnnnnnnnnnnnnnnnnnnnnnnnnnnnnnnnnnnnnnnnnnnnnnnnnnnnnnnnnnnnnnnnnnnnnnnnnnnnnnnnnnnnnnnnnnnnnnnnnnnnnnnnnnnnnnnnnnnnnnnnnnnnnnnnnnnnnnnnnnnnnnnnnnnnnnnnnnnnnnnnnnnnnnnnnnnnnnnnnnnnnnnnnnnnnnnnnnnnnnnnnnnnnnnnnnnnnnnnnnnnnnnnnnnnnnnnnnnnnnnnnnnnnnnnnnnnnnnnnnnnnnnnnnnnnnnnnnnnnnnnnnnnnnnnnnnnnnnnnnnnnnnnnnnnnnnnnnnnnnnnnnnnnnnnnnnnnnnnnnnnnnnnnnnnnnnnnnnnnnnnnnnnnnnnnnnnnnnnnnnnnnnnnnnnnnnnnnnnnnnnnnnnnnnnnnnnnnnnnnnnnnnnnnnnnnnnnnnnnnnnnnnnnnnnnnnnnnnnnnnnnnnnnnnnnnnnnnnnnnnnnnnnnnnnnnnnnnnnnnnnnnnnnnnnnnnnnnnnnnnnnnnnnnnnnnnnnnnnnnnnnnnnnnnnnnnnnnnnnnnnnnnnnnnnnnnnnnnnnnnnnnnnnnnnntgcctgttcttcatactgcaaaggccacccccatgtcctggaagtgaccagccactgtgccttgtgaatggcctgccagactttgaggagagccatttggtgtgatgagaagtgattgagtgtctgctgacagtcaccattcagtgacagagatgtggaataattagtctgggaccagagagctataaagagtttgtaggcaatggaatagtcacctggctcgtgaaagccaaattgatttggcagtgatctaggatggagccttcagcagccactgaagtgctcaatggtggaaggactggaaccattcataatttgccattgcttggagcggcctctgtgtgttcttccttgtaatgagtacacggcttaaacacttgtattctttgaccattttagtcttacgtgatatgctttggcccaatctccccattatgctgactccctccccaaaacccttttactttcaccctgtcctttgccttttctttcctcctgtatgcctttttgtgtgtctcactgcatttagttagggttgcttactgaacatgggtgggattatacacttgggcaagggcaccttacctgaagctatcccacttagaaactgactctcttctacccttcaacagacttgcactgcccattagctcctcagggaggggtagggtctctgagctccttccttatcattggtactgtgaattcttgggtttgaggcaggatctcatttaggagtctaactagctcatggcttccaggcaggctcttctttttgcttcccatctcaccatgggagccttgtagtacagatgtgttatctgcctggcgattcgaactcatatggcaagtcctttcgcactgctaagccatcttgtggcagttttcggttactggtctgtgccttaagaccttgtggcagcctctttttatgtccgcacatcttgccgtcaccttgcttaggtgttaaccaagttccaagggtggatgcctcgtccacctgcttaggtgttaacccagttccaagggtggatgcctcgtccacctctcaggtggcccgtatcactgagacagctccacacatagacgtcaaccttcaccaacactggctgtgctgaggcttctcagttcatggctgtaaatgtcaggaagccaaatgatggtggactgtgcactaattggccacgtacttggaagctgcaggcgggctcacttttaagtaggcgctttgagctggccttcctgctgtctactctgaaattctgatgctggacaaatgtcaggaggctttctctacaccatcactttcgtctttttgaagagaccccggaggccattactggagacggaagtggcccccatctggtttaaagatagccatagagagctcatacgaccctgcttctggcttctcaggcagaggccagcagctgtcatgacccaccctgtctcccgtcaggcacattggccattgaaccctctggtccatagttagcgcttgctctggagtgagctaagcaggttcccaggctcacctggacagacaagcactcataaatattcgtaaatattcatgtcagaaactgtgccctagaaatacagttggagctttattcttagcctggggaagagggtctaagtgattggtagtctgaaatgtcaccagtattactcgtatgggtggacaaagggccatcgtgtggttccttggctcctgcctaggctagtgcctcctctgtcctgccagtgtctgtctatgctggtagctgctgctgtcactctccctctacagagtttgctgtttgttggcagcactagaggcactcaaaggaccggagaagtgaattgaaatacctggtggcttttgtgagtctcaccaacagtccaccatctgctcagcctcagttcaccagcttcttgtgtttttaaactgtccaagtcactagacaggttgttattatttcttcttcttcttcttcttcttcttcttcttcttcttcttcctcctcctcttcctcttccttctcctcctcccctcccctccctctcctttcccccctcctccnnnnnnnnnnnnnnnnnnnnnnnnnnnnnnnnnnnnnnnnnnnnnnnnnnnnnnnnnnnnnnnnnnnnnnnnnnnnnnnnnnnnnnnnnnnnnnnnnnnnnnnnnnnnnnnnnnnnnnnnnnnnnnnnnnnnnnnnnnnnnnnnnnnnnnnnnnnnnnnnnnnctctctcccctcctcttcctcctcctactcctcctccctctttttttttttttttttttttttaatgatagggtcttatgaagcccatgctgacttgctgagcagctaagcatggccttgaacttgcgatactccctcagctacccaagtgtttatttataggtatacacaaccacatccaatttatgctgttctgggaatcaaacacagagctttgtgaaggcaaggcaaggagtcatacctccagtctgtcaccaggtgggtttcaaatgtcactctgttctggctttgtcctcgaagagtaatgactgctgcaggttcctcctctatgtcacatggtgtcatacctgacaccatggcctccttgtcttgccttgtatgtatgttctctggggcagacactggcttgcctttccagggctcttggccacctatttgagctgtggcccctctctgcttttctccttaaattcttggggtctgtgtctctagtcacttcatccctcatcccatgagtgcatctgtgcattgtctccctgccatatatggcactgatgtgtctgacacacacctgtgcctgctggtcagtaggtgtcccaagtgagtagtgatgggtggggtaggtaccacttgagctgagatcatccccccaccccgagcagtccctgccttgggaaggcatgactaaggagctgtgaggtcctgaggcctcctgcccatcagagcgagtccctcacttctgttcctcctgtttccctgggccatttgtttccagctagtggcttggcattccttcctgtgtgctccttgatgttctaagccttcccactggctctgcttgctccatccttcccctggggcctgctactgacagccctgagggcatctgcactagatggcaagctgacctcttactgaatccagtccccagactgacctctcggtgtcaccatctgaccctctttacattttgtgtatcttataaatatggggcctttggagcccagtcccttagaatttggaagggtgagaggggctttctggtgagtgcatgtggctctactctcagagtgtttctgaagggcctgtgtcgtcatgcatgccgtctgtcctcttctgttgtgtggaaggtaacagaacctggacatggcctctagctacttccgagtaaatggcattgggcatatgtcaccgtaagcttcctgtatggtgttgacttatgcacctgatgcccatttactaggcctcccctccaggttgggagtcttgtctgttgggagacaacttttgggtggggacacctggtggggtgatagactgtttttgctgagtgctgactttgcccttgcgatggcttctggggcaggaatctacctaattagatgggtatgtggctcttgggagaaaaggccttcttccagaatggtctatctatgagagctatggcctctgaccgtgcttacattccccctctgctcctagggttggtgcctgggatagaccctgcccagatgagcctacatctggggttttagcactcagcctgttccttccttcacccctttctctggagcggcatgctgcctgaaggctgtgtaggaacacactggctttctggaagtagctgaaaagctcttgccagagagacaaaggtgctgactaattgacggctttatttatttatttccgggcctagatggtaaacagctttgattctctgctcagcgggaacaggcgggaggcactgcctgattgattcctcacctgcaggcatgcatgggggagcctatcgattggccccgcttgccaaacctacttgagagtgggcttaattgcctcaggactgccctgctcacaccaggccctagcaagcttggcctggaggtgtcactctgcttgctgagggtctctctccatcactgtatccttggaggccccacaactccttctaggttctagccattcagtggccccagaggtccaggccactggacatattccctaggctgctagagaaagaaatgcaatgaggacagcctggaggggtcagggaagctgagtgacctttgcagagacaaccagaggctggctgatcagcaccctctgcctctgcactccgatctcctctcacagtggccatatgtctagcttgtatgggctcctgtgtgtcatttcatttttggcctctgtactggctgggctctgctgtgtcttgtggagtgttttttagtagaagtggacagatgccatccctgtctgttgattggacagatcccttaccctttgggggcagtgtgtgcagggaagatggtgctgcatttgggcaggagctccgactttgtgatgctgagtgtggggacagtgtgtcatgtccctcccctaacttcttatcttgttataggggacagtagtctagaacattcatttgcaatgaaatgttcatgtgtttagtctctatttttggtccatacaaggattagccaatagactaggtccttttccctggcctatgtgaagggtggctaaaccagggttccttgagcctgctatcttgcctgttcccccacccctgacagtcactttaggcagttagtgatccctggactttaccactctttgcttgtgtatctgtgattcttctagtgtcctctcaggtgtccatccatgcccagctgtttgctgtctttggagcagcatttgcaagggacagggctgaggccagtttgatggtcctctctgtctgacacagtagggtcagactttctgctttaccaagtgatgttctgctggcccctcacttgagactggagactgttgcctgtttactcctgggggtctgtggctggtggctgatgtccttgtgcttgcttagctctggacccttttaccagccacaaactgcctgcctgaatccacagcataatcctgtacctcttctctcccaaacgtgcttagagctggttacctggaaaagcaagatcaatggcttcaataatgagccacttgctcagagctgtgagtctgcatccgtcacccatggggaaactccaggcagagcagtgtgccttgaccttgtagactaaagtgtgtgcgtgcatgtgctgtgcttgtgtccctcctcccccttgtccctttcactggggctgatacccagccccatcaggctttgtgttgtgttcagagcatactgtatgtggaccttaaagctgtgccagtgctgacattaatgtggcaacagggaactggtcagctactggatatcatctcatgaggggtcttagacctagaaggaccctcatctgcactgtctaggtctgtcctgtaaatgatactatacaggccaatcccgtcagagttatctgaagcagcaggtcctggatgaccctttagatctgcattgctacaggtgtgtctcccctgagaccttcacattcaacatttgtatgggtcctgtctcccatgactgcatgttttatgtgggtgttgtgactttgtcatctctcaaacaccaggtgctatgtagcaaggtatactagctgttttgtgtcaacctgacataagctggagtcgtttgggaaaagggaacctcagtatagaagatgccccatcagactattctgtggtgtattttcttggttaatgattgatgtgtgtgtgtattggggtagggggctagctcactatggggattgttaccttgggctggtagttcttggttctgtaagaaagaaggccaagcaagccatgaggagcacaccagcaagcatcctcctccatggtttctgtttgagttcctgtcctgtattcctcagcagtggactggatctgagtgttgtaaacagaaatgagtcctttcttctctgagtttcttttgatcatagtgttttctcacagcactagaaaccaaactaagacacagggctatcgtgtcttcttggctgagttctttccagctgacttctatcatctttcctaggtagcaccagcacctacaaatggagttctttgccctgcccatagaaaccactggactcagcaggatcagtcatcctcatgccgtaatcttgatggcattgagaggcgcacctttctgtcactaagtcgccctttcccagcctggcctttccccaaaggctcattgatccttctcttgaagctaggctgcttgtgtttttagagaatgttggtgttgttagaaaatgaatcacaaatacagctcctggtttgggaagctctgttttaggcacgtgcttgagggctgtgctcagctcatcccaaagttaggaccccacttgtgacatcctgtggcagtgctcctacgctggcacggtggcccctgtgccaggttgtcttggaggatgttatccgtggtgaggggcaacagtaagcatgtgaaacactgcctttctcctgcacatagggagaagtgaaggatcggttttttttggggggggggcagggggcccactgaacttgtggtttggtttgtaggatggggaagtcaagagagtatgatggattgggcaggcttcgtggtgtcagaccacactcggaggctagggagggcagggaccctgggaggtgagcaggtacctgagaatgtaaggcatctccaggtccccagaagcagagatcttgggaagtgggcaggacaggattgaggctcaggaagaagagactgatctggggctcctgcacagagcttcttgggaaagaggaggatagcagacagaccttggggatcagtggctcttagctagagagtttgaaaggagagtgagacccaagatcacagtcctggatactagcaaggagggggggttctggaagtggttgagtcagggggaaatggaaagtgagggcccagtggaggtttggcagagtgaatgtctagaaagcaccttgaactttggggtgtatcactccttagtatagattgcctccaaagtcagtctgtcagtctgtctatctgttgcctctgtggtctctgtctctgcacaagtacatatggatgcatatgcaggcatgtgcttgtgtatggagcccagagactaatgctgggtgtcttcctcaactgttccctattgaatctggaacttacagttgtgttaggtggaatgggcaatgaactcctgtgttcctgatgcttgttttctccctcagggaagctagatttaaggacctgctaccacgtctggctatttacatgggtgctggggattcaaactcaggttctcatgcttgtgaggcaagtacttgaccaaatgagtcatctctctagtccctgcctctgtccagagagaagcacacccacatctggagctgtactcctgccttgctctgccgaagtaagcaagctctaggggagccctacacacacattgttcagggacgggggaaggctccccctttcctcccctgtgaggagagctgtggcgtggagatgtgaaggtgccacagcctgtgagctgccttctgtgtccctgagatgctcagctgagagctaggaatggaaggcagtacatagagagaatggctagggcagaagaatcctgcatagacaagccgtcataggaacaatgaagcatagatgcaggtccaggctgccctctgtggataactgtgctctgataagcatgtagtcaagagggtggggcagctgggaatgcaggcaacccaggggcaagactttgttttctggggtagtggttcaagtgaatgccagtcttgttgctgtccacgagctgaccttgtctgagcaacccatgacttcacacaggtctctcagaatggcaaatcttcaaccagaatgcagagctatgctctatctgtggcatctggtctacctgctgtgtttcaggcagcttgctccccgagtctcagagttctggtactcatgaagtgcaggctatggcttcttctggaccatttgtcattctgtgtggttcttacaaattaacatgaatggaagccagagagatggcccagcatgccttgaggctgagtatgagtattgctcttgtagaggacccaaatgtttcccaccacctatgtcaggtgactcatagacacctgtaattacagtaaataaataaatatgtacacacacacacacacacacacacacacacacacacacacacacacaatttttaaaagatgacataaagaaacctttgttttttatcatgtattcttacatagattttcacctctcctttgtcatgtccaagtgatggcataaccattccttctcccaacctgtttcatccaaaggagaggtctgtctctagccccttgacacatgccatcttgccatagggattttggctatttccaatttgtcaaaaagcagccgaaggtccatgtggttgtatgtggatgataccacactgctttctgcacattattccactataagggtgtaccacactttaatctgttttctatgcaagaacatctatgctgcgagtatttaactgtaagagcacaccacaatttattccttcattctttttttttttttggttttttgagacagggtttctctgtgtagccctggctgtcctggaactcactctgtagaccagactggcctcgaactcagaaatctgcctgcctctgcctcccaagtgctgggattaaaggcgtgtgccaccatgcctggcttattccttcattcttatttgagctatttctgtgctttggtagagggaatgaaactgctacatgtgagcactccacccctgtgtgtgtgtgtgtgtgtgtgtgtgtgtgtgtgtgtgtttgtgtgtttgtgtgtgtgtacctttgtggtcaggttgcatttttagcttcatgagaaatggcagagagttttggcatggtcatcctcggagtattcttccttgggtggatgctgatctctttggtctccccattctctcagagttgtgggctacaggtgtatttccaggtgtgtagctccctagccttcactgtctctggaattttccatttccttggcagtgttccagtcagcttgttttctgtattcaactctctgctcaccaagctcaagccccagctgcaagattcaggttttgttccatctcactacgctccagcagccctgcagccatttatctttcttcatcccctcagcctctttttcatttagctcaggactcactcatgacttcagaggaactgcttctgtagttcatcatagcccgtgcttctgtgtaaggtgcagtatgatgactgagcagacatgatcttggatgaaagtggtacccaaaggtgtgatgtccaaggaggaggttgggggggaaggagaccaggctgtcccgaatttgactgttttcaagccttgcctggtagtatggtgtgggatacacagcacggcagtagtcacatagcaagatgtgtgcaatgtgatgtgaggcacacattgtgacacaagtgtatatgcatcattgtgtgactgtgtagaatgaagtatgtgtgtgattcaagatatcagctgtatgccttgttggtgttctctagctattttctatgattttgtgtgtttgtttccatttgagtatatgcatgcatctgtgtgcatgtattcatgtgtgtgagttcatgttttatgtgcacatgaagatgtatatatgtgtatgtgcttgttcacatgcttgtggttttatgtgtgtgtgtgagcatgtgagcacatatgagtagcccagaggcaaacaatctcaaccactcttcactatatttatcattttaaaattttattttattatattcttagtgatgtgcatgtgtttgtgtgcatgccagatccccagagctagagtgacaggtggttatgagttacccaattatgtgtgctaggaactgaacttgtgtcctctggaaaagcagcaaatgctcttaactgctgagccatctctctagcccatccaccgtcctttagagtcagggtctctcactgactcagctaggctggctggccagtgagttccagagagcccgtgtctctgcctcccaagcactggggttatagttgtgtgtcatcatagagacatttatgtgggtcctggggatctgaactctgatcttcatgcttgcatggtaaatgctttacccattgagccaccttccttcccacatgctggctcctgtcttccctgagctcttccccagtactcaggtaccccatgcacctcttgctcttcatgcacagcttccctcctgtgctcggacatagctgtctcctccatctgcctctctttaggggtaaacagagctttcagtagaagagagagaaacaagggagatgatgggtcagaaagtgtttatgtattgcttgctgacgaaccattttgagtgcaacaagatcccagggcaggcagtctgccctttctgtgaagaacaggaaggcttcttaccctgttcttaccctgtgcgtgggtatctgggtgacaggtggtgtgaacccatcacaggatgccttcatagtctaaagagacggtacaagagtggtaggtacacttggggtctaaagttgctgtctctattgaggatgcagagtcacttcctcagcttcatgcttgtatagcccttaagaatggcacaaacagcttacttcagcccctttatgctgagtgtagaagagtctgcttccagactgtacccctgaagttgagaggatgtgggaagaaagggaaagaggcccctgctgtgctctgatataccctggggtagtgctccttcccatgaatgggaggccaggcacagaaggggcaggagcagcctctgtcctttatcatagctgtgccttttgtgtgtcaaggcagtatgaagtgtggtgtagggccttctgcagccagcaccatcatagtctggcactactgaggcactgggactcggagcccctgggtgaggacagtgtggagcttcagtcttcctgtcctctcactaggctgcaagatcaaacagtagaggacactttaggaacataaactgtgtattttaaaaaaaataatttaagccagacattggtgatgcacacatttagacctagtattgggaggcagaggcagctggatctttgtgagttcaaggccagtctggtctacagggtaatatagagccagggttatacagaaaaaccctgtttaaagaaaaataatttaaaaattcatagattcattcattcgtgtgtgtgtgtgtgtgtgtgtacatacacacacattgnnnnnnnnnnnnnnnnnnnnggggggggggtgtcttctatgcactgtgtgaattcctaaagagaatccgcagtacatatgtataaataaatccctcccgagacaataaaggcaacagggagaaaggcgccacgaacaccagctcagagcagggcactagctttccgctgtcagcctggcatgagcgttggtattagcacacacacacacacacacacacaccccgtgcaccattattttctccacttcctccctccacctcctgataaacaagtccccttcttttctttttggcctggtgcattccattagggatgcttgcctgagcatggctggaaatgatttacttgagaaaaaggcaacttgttagtgtcctcactgaggaatggctcctacccctcctgcagctgttaactgccattagctcctcagggagtggtggcacctcctgaactcctcccatcccatgcaggtctcatgtaggttcctgctgccctgtgagtttgtagattcactagaccgccctgtccagaagacaggtttcacacactcttctccatcccctggctcttacattctttctgctccttctttggtgactttctcgagtcttagtgtggttgacatcttacttcaagctcgccactcaacagccacttattctcagagctttgaccagttatgagtcggcctctagacccaggcattgagagcactaatgagctgagtcctaacacacacctgttgtagttgaatcctgcccctgctgtctccatctcttgggttggcaaggcatgtggcctcgtgacagcctttcctgtggctgggctgtgcctgtaaacagtttgacctccacttgtatgactgcagtgaacatccctggcaactgttgggacttccagaatgtgttcccaaagtccccacgtggatccagggaataattagtatcctgtaagataggaatcttaattcttaaattacatatttagcagatggtccaaaatagcacttgtaatggcaacattcaattagtgagtttaaaaatgtatattattgcaacattctctgtgggttttattcagagatttctaaatatagtggataaaaacacagaagtgttgcagacgatttagactcacactgccgcagtgggccatgtgctaaacttccctgttaaccagaagtgactgcccagaggtcttctggtttattactcaatctccaaaaaaaccatcaccaagacattcaggggcatccctggtgcccacaggtcctgcacccctgtgcctgggaattctgatgtccttagaactcatgagacttgctgggcttgattgatgtggactccaaaggcagccttgctccctctgtggaacggtcaagtgcatcctgtctgtgttccgtgccctcacaatccttggttctggttttgtgtgggcctaaggtggtcccgtaggtggactagaatgtgaatctctgtggacaggaagcagctgagagcttgtctgccccatagagggccatttacattgcaggaggggcagagctggggtaggtcacccagaattcaggtgatagaggtcccaagacacaggcctgtcctctcctggggaccagagtcttcccagctactagggagattgaagggaaatgccagttgaaggcatgcctgggttacagagtgaattagttcaagtcagcctgagtagactctaactcaaaaaaaaaaaaaaaaaaggaggagggctgaggacatagttgtggggtagagtgctccatgaggtactgggttcaaaccctgggcattagttacttttcttgtgacaaagtacctaacagagcaacaccaaaaagggagaggaggggagagagggagggagggaggatatcttttgaatcacagtctgagggtgtggtccattattgacgtgaagtcatggcagcaagaacatgaggcaggtggtctccttgcgtctgcagttagaaaacagagacaaatgctggtgctcagccccctctctccattttatttagcccagaaccctagcccatgggatggtgcccctaatatttatggaggtcttttctccttaatcaccctaatccctcaaacgcacccagaagcgtgttaccatttcagttctaagttccatcaagctgacaagataaccatcacactccagttctcaattatgatgggagaagagaggcagggaaccatggggttcagtgctctgagctacagagagggtatagtgggcccaagactatgacaagagcctcaagcttcctccttggtggctgtttgtcttccaggaactgctcatcggacaagtgccattgcaaggaggcaaggcacttggttgggacagatccccagaaactgtgaggtcctcttttagcagccattcttgccagtgtctgcttgggcaagagatgccttgctgggcagttagccccactaggcctttgctgttctggccttcagagagaggaagctctcctggtgccagagaaagccaaggcacaaggtctttgctcatagcagcagatgcagtctgtgtgagacggaatcactgttgagctgaggcacgggctctgccctggggagcttaggtccctggagaccttcatactaagcctaggcacaggcttcatcctgcagagcctagatcccagtgtatgaaagcagagcctcgatcctagtgcatgaaagcagagctttatcacaggatctgccctggagagcctggatcccagtttcctgaaacaggccttaatggtgagccaagtcgtgggttcccacatttgagtcctggtcctcagagcaggccttcgtggtaagcaagtgtttacagcagagtctttgttcagaaccccccaaccctctctgtatatttaaacaaagagctttttagacctaaacacagatgttcatttgaaaatgagaaatcaaattaagcggaaccagcctttgaaagtgaatgccccgtagcaagccaaacaaagggagaaaaacactgtgtgtaaatttcacttaaatcactttttcatcttaaataaagttttaaaggaacaaagtgccgcgtcaaagcgctcatcaccctcctgtcctccaatggaacatctgcgctcattctgatgtgaggaaggaggaattaagccaagccggggagcgctccccccataattgcgcctcgtccctttctcagacacaatgcggatgaaatgccgattgagctgctgacgaggaggctgaatagccgagtggggcgatgtgaatcccactgagcctatccagaggatctgactgccccccccccccactttcttccttttgacagagatgtcatctcctacataaagaaaagacagcttgcactcagctctcagaagcccctccctacggtggagtacctgctcagcaagttttaaaataggtgtttccgcacacctggacaggcacattgctggactctctggctagctagtgtcctctggagggctgttatactgccagtggctcagcaaaggccagtcactcaacctacaaggacttgttttagattggaaatggtggctgtaggttggtgttttacattattattattattattttgaaaaagattctcatgtattcctagctgctctcagagtcactttttagctgagaatgatcttgaatttttgatcctcctgcctctactccagttgcgaggattataggcatgcactaccatggggaactcaggaccttatgcatgcaaccaccacacccaaccagagacggtgttaccgtctattcctctctctcccccaaagccaagatgccctccaatgagagagaataaagaaaagtacatcccagcatacaggaagccgaggcggcggaactccacaaattctaggccagcttgacttatataaatgaggcacacagacacatagcagtttccagttatagaaagatcttgaggtgagttcagtgatagaacacttgcttcatgcatgcaaggccttgggttccatcttcagcactggagaaaaattgcagggtctggggagatggctcagtcagcaaagtcactcttatcatataagcgtgaggatctaagtctaagctccggagaccatgtaagaactagccaggcatggtgttcagctttcatcccaatgatggcacaggggagacaagagaatgcttggaaccccgactatccagtctggatcaatcagccccaggttcagtgagagactccgtaccccccaaataaggtggagagtggttaaggaagatacttgatgttggcttctgactcccatatgcatgcatatgcactcatgccaaacacatgtgcgtacatttacaaatatctacatgcatgcaggctgtggagagtaatcttagatgagacccaaaggagtaaggagtgagttttgttgaaagaatgggcagggctgtgggggctgttgtcaagccatacaaagctccacaggatggagtgctgtatttagttggcttatttagaggagtggcctgtgttgttttgggaagcaggaagctctgtggtgaatgtggacctggagtcacagtagcaggctgttgacagctcatgggctgttgcctactcttagggtctgcagtcccccacctcagctgaggctcactacctcttccttgtccctttccttaaagcctccccacctgcaggtaaggagcatcctgcttccctgcagagctagggtgggcctggttcatctgcagctctctgtttccttcccacccagaagaatgttgctgcttaggagcctgtatgccccaaccagcttaacactggcatggtggcctatgcatgggcaccttttcttttttttccagtaccaggctgtgggtttgagcctctcacaggtactgcctttgtgagcacacacagcactcagcatctgctgccttttctccagggattgaatgtcttcagaattgaattggacagtttcatctgtccccagagccctacccgggcctgtattacaagaggtcagtcaggacccaggggaatctccataggcagcaggggcaactgtcacatctgtggaaagtgctagtccctgccactgaagtgcttcctaactgtgggaaggttaacctctgcaccttagcaactgtagaggggatgacagccacctttccccttttgtttttggctgaggccctaatggctcaagtgagaccttccaggttccgggctggcagggagccagacttccagtgcaaggatactgaaggtttagggaggactggctgcccatgctggccaggctggccaagcagctcctccctttgtgatgggactgaatccagaacttcagccttggtttcaaaacaaagcaaaacatctttttattatttttatggatatgggtgttttgtctgtgtatcacgtgtatgtctggagtcagtggaggccagaaaaggaagtcggatcccctggaactggagttacagatggttgtgagcactctgtgagtgctgggaattgaacctgggtgatctggaagagcagctggcgtttctgaccattaagctatttcttcagcccctcatactcaggtttagactgggctggggagaaccccctggcccggcagtgctcacaagagcactacttggttctgaagcaggtatatgtctgtgtaggagagctgggaggagggaagggtagtggaaagtggacatgttgtcaactcccaccttctgaatggccccaggggcagcactgcatggagagagactgcttgtcttgtcttcaacccatagttcctggtaaggtagaggtgagttgcaggagtgccaggcctgaagcccaacccaaaggacatagctgtgcaggggtcggattcagcgatgggcatgtccctagggagcatctttcctttcttagcttccttcctctccgtttgatctctgtaacctgcaatctttgcaacctgtgttgctcactgttagtcacaccctcctgttgtccctcttacccatgtaagcattcttaccctggcatccccaatgaagctttggcagtgtctcacatatggtgtttgagaaaaccaggaacccttctaggttgcaagggcttctcaccccaggactgttggaccttctgcacctggaatggagacaaggcagactgtggcaggtttcttctgtgtgatgggactctagtgtctatttttttcatggtttagtttctcagaagtgactggtcacattggaagagtcaccaagcctaaatctaatcttaccgtttgaactgtgggctgggagcagatgtctgtgtgggggggaggggatgatatagaggcgatttggccacagcactcggaggagatattaggagagtctgggtcctctcttcacagtcatgtggtcaggctcacaattgaaaggtgtcaattcatttaaagcacagctgccttcagggagctttctgccctgaaagcctattgagtggctctctttgcagtgactgtcctctcttcccagcaggctcctctgccacccacagtggggtcaatttagcttgggacccagggtggtttctgctctactgatcacagtggaggcaatgtgtgacacatgcatgtggctagaggcaatgtctgacacgtgaatgtggctggggcaatgtgtgtcacatgtatgtggctggaggcaatgtgtgacacatgtatgtggctggggacaatgtgtgacacatgtatgtggctggggacaatgtgtgacacgtgtatgtggctggagacaatgtgtgtcacatgtatggtgttggtgagacagtgtgtgacatgtggaactaatagagttctcctcatgccagggaactaggctgagtttccttggtctgtcagcatggccttatggttggaagctgctgccatttgtgcctctcactgggctcatgtgcctccttgagtctgtgcactggcaccctagtgtctctcggtggcagttgactgctttgctgtccttggccctcccagtggagtacctgccagttgcataagtagtgttagtgacatgtgtttcctgtggtgtggccagcctacctggagagctctaccctgggccttctgcctagagactactttactccatcactaagacctctgctcttctctttttggccagtgattataggctctggctgaaggctcaaggctgctccctttggattaattcctcataatccttctaggattggagtgttttagatcacacagttataattgggggtgtatggaggtctcttctcacctcccattacatctttagaaccttagtgttttatatgagacccttacttggcctgggggtgtcctcttctagagactgagatggctgctggtgccacctgccaggatgcctgctaatgtgtgcactttgttacttgttcttcactgctgctaagagtccctgcctggaatcccccagggaggggctgggggagtgactcagtggtagagcccctgcctggaatctcccagggaggggctgggggagtgactcagtggcaaagcccctgcctagaatcccccagtgaggggctaagatgtggctcagacatagttcttgcctattgtgaacaagactcttgttcaatcctgtgtaccaggctacaccacactacactacaccaaaactaaactaaaactaaataaaaacaaaaatgaaatgagcaaaaacagtgattactaaggctgtgcataagtgtgctgtgttgtattccactattgctgagcctgctgccctctagcaggggatagcacaaggacttcatgtgcatgcggcctcccttgacagcagactctatagcaaaagacaacactgaagttggtgtagctagtgtagcgaaccactccagtaattggaaggggagttttttcagactctcatgatgaaggattataaatcttttctattaaaggtgaggtagccactgagggtaggaagcaagaagttgaagcacattggcagccctccttgctctgcgttgctgatggggaaagtggttagttaattaggtgatttttctcttcctctgacacgtgcaaatgagcctccgttaataactgagttattacataaatgataaaaatttaacaccaatgtcaagttgtcaggagttcctggacaaggaaggtgaacctggggaggttccccactccaccccagctggttagttctttgaaatggtaagtgaacctccgggaagttactgagagcagcagggccagcggctcttttgcacctgatggcaggaatctgcactagaatcctgcctggttccttctggttcctggatggagtccagcaccctggacagcatccttgttgttctggctctggaggagctgctgatcaacaggcctctttgaggtctaggctcagagttctgagatagagggacttgtagggcaggtctggggagggagtgttctttgctggggaccaggctacctgtaactccataaagcaggaccctgccccagtgtcagaagccacaaaacagaaagccaacccagaatgtctgagaactgaggaggccaaaggcgacccagatatgctgcttccaagcagcggaccttcctcatttagcctcagaactgttaggcttaggtgatggctttactgtggaggcaggtggctcctgctggggagcactattctctacatgcaggcttggtttcaggctgaccccaaactcctgatcctcctgactctacctgcaacatgctggcatttgaggcatgtgctgctatgcctggtttatgtggcgctagagatggaatccagggctttgtgcatactaggcaggcacttgaccagctaagctacaagcccctgccccatgtgacacacttttaatctctgtgggaagctgcagtctaaaaggcgatgttctcctcttggacattgagagttcagtgagctagttagagaggacttgttctctgctcagaaaagctttgtcctcctgctgccttgactggaaggcagtagggttactaaatctagctcagttggccagtgcacatcacctctgcagtaagggggcgggggggggggagcaactgcctatcactctaagtgtccatcaggtcagcacaaagtgcttgtgtccataataggttgttagctttgtgtagctgagagtgaaggccctcttggcagggagcttgcagccagctgccagacgagatatgaaaatagttggagagcttctatgactgataggccccaggtgacattaggggatatgagaacatggttttctgtgttcttttaaatgccccccaccccccgacaaagtgtcactttatatcccttgctgcctgaaactcactgtgtgagccagggtggcctgggtcttgcagatatctgcttgcctctgccggaattactgctgtgattcaccaggctgtcttacctgtgtctgatgtatggagtggtgactccatggagtgacccttcaagggagtggtctttgcattctagagactgtttatgggcctgaggctctgctgccctcctgtagctaggctggtgggttctggagtccagagaaaagtgggtctgtaggtcaggcttctcctctcacttttgggagctcagctcctacctgtcctctggcagattttttaggacagtaaaattcgtggctgtctcttctggaaatctaaaatgagatttcatttctttttaagttaaaaaaaaaagaagcttgaacatttgcagctgggcgatagcagagatttcagtgttacttatctcttgcacaaaggaggcaggagagaggactctgtcaaggctgaatactaacgatgtggaggcggtggaaagcactgagggatgctcttgcagaactaggtgggagatggtcagagctgtgcactgcagccaggtgcattgaatgatggatggaaggaggggtgagaatgaccttggccttccgagctgtaggtcccctgggagctgccattgcccttgggacgctagtttgcagagctggtcccattgagtctccaccacttttagaaagtctaggctcaatggccctgaacctacagtccctacttcctttgctatgtgctctcagccccatctcctcagtccgtgtcattctctgtcatgttagaaggatgccctattctctacatatatcctttgtcctcctgcctggaattccacatccagatcgtgggtttagccaattcctgcttggcttttaggcctggttcaggtagtggggtgctctagccccgttgtgtggcttttctttcattattccatctcaccttggctgcctcctagagacagcaggtctatgtgtggggtaaggtgtgcaggaagtgcctgtttctcccagccctgttccttacagcctggtgaggtccttgctggttaggtgttcactggctcatctactttcccaccacaggagtggtttctgagggttgcttgtgtcccttgtgaccagtacttgtgctgacagagtctatagtcctttctgccccgaagcacctgggtgccacctgagcttggggtgtttcctgctcttccactatcagtctctgtgagggagcactctctgggtgacagttggtggcctgccccttgtatctgtgttaccctttcttagtctctcttagcactctcatgcagtgtgtctgggtcagccctgtgagcatcccaggttgcagggcgagggaggaaaagcatcattcttggctgtccttgctcttcctcacttgctgtatctgccgtccccacttcctgcagctgtgcccccccccccccacacacacacctgggggtgggggaggaaggaaaggatgtcaacaatacgtttgaataacctgttttggatctgactacaaaaagaatacagtttcatttagaacatttgacaatgtagaggaaacaaacagaaaagatgagaagaaaggtttcccataatccctctgcctcctgaaagccagtctaaatgtgttcgcttagatttggcctgtgtgtgtgccttctgaggtaattgttagtaaaaacaatagcatgtgtactatttggggagtctacctattttgcttaatctttcctgacacttcccaaattaaatgttctcacaaaacaattttttagcctagataacatgtttagcatgggacatacttaggttcccctccaacttgtgactgtggatctttctcattaagagtgctttattcagccattctcccactgttagctatttaatcatctttagtttctcacctctattataaataataccctgattaatatgtgcctccaaattcttgcttgcataaatgctgattatttcttcaagaaaacctcttaaattagaattatgcctttaaaagtcttcacatttttaaaagcaaaccacttgggaacgctttgccttggccaggtggttttaccaacattatcttcattatagtcaagtaggccattccctcacccagcagaaagggtaagatcacatctgtgtggccttgggttagaccacagttctttagttcctgcaccagaagcaaatcagtataagagaaaaatggtaaattgggtctcgtaggatctggctgtaactcatttagtaaacagttatcttaaatgtgttaagccatgggttccatctccagcattccatgtgcctagtatggtggctcacatgtaatccagcactaatgaggtgcagacaggaagaccagaagtttcaggccatttcaacataagttgaaatcagtgtaggttacatgatattctatcttaaaaataaataattgaagacagagttgaaacaaaacaaaacagctctgcccctctgaactgttgttatcttgagagagtggttacatctaaacttcttggcagagacaagcctttctggtgtgaagttccaggtcatacatgtagtcctctcctctccagaggggtcttttttagcccccctgctgggtgagacttgctgactcctctgatgagcggaggcagaaaaggaagaggacgatctttgatgagggaggctgctaatcctgtgcaagcctctccctgtggatggtaggtctgttggctcctctgtcacccctgaggatgtctgcccaactgatatctccagtcctgccctgagaggaccagtatgcattgtctaagacaaacaaacaaacaaacaacatcgaaaacccaaatagactacaaacagattcaaaactaaaccaaatcaaaagcacagactgttggtacagctttccagggccagagaaaggctggagattcagtctttctatcgcatttttctggtggttagaaatgatctctgggaagctgagtcagagacaaacaggccttgaatgtttgagtgtcagaaggccaatggtgtggctcagatgcagtgaccgagggtaggtgtgaagcctcagtgacagccgtggtcaggctgaggcagggatgaaaggtaggagatggctcgctccagaaaagactcaaagtgagggtgcagaatcatgggcatactctggggaccctggtaactgccagaagctgctccctccaccatagcctgattgcctggtgtcagccagtacagcaggaggttcgggtcacgccatgtcacctacctccattcttctgtgtggattctaaggggagaattaaatgcctgtgatggtcgggcgtggtggcacacgcctttaatcccagcactcgggaggtagaggcaggtggatccctgagttcgaggccagcctggtctacaaagtgagttccaggacagccagggctatacagagaaaccctgtctcgaaaaaccaaaaaaaaaaaaaaatgcctgtgatgattgcagtctgagtccccacctgcttcacctctctctccctgtgtccccaccccatcttcactttcaacttcagagtcttatggtctaggctgacctcagactcaatatgtagtcagatattactttgaatttgttgtaatccttctgcctctgcctcttgagtgctggaattataggtatccaccactccacaaggttcatccaattctggggatcaaagccagggcttcatgtatggtaggcagtcactctgtcagtggagccacattcccagcccctctgagctactgttacctagctgtactctccaagtctcagaagctctctcaacacactttatttctcttggcagctcttggctggcaggcagccttccctttaccagaaagagaagcctggccattcccgctatggtccacaggcagtggcttcccgagaacgtggcaatcctattgatttttatttatcagtagtgaaactctgtttgatgtcttatttttcgggtcttgacaaataccccaaacattagtgttgatccctgccattgaggatggtggttatcaccctcaggccagtccaacctccatccccatcagcccaaggcagagagttaagtgaactttgaagtcaggcttctactgagtacagccacctcctcccctcagttctggagccaagggatttgttttcttttccagcccagggtagcctctcctcagcagtgtgtcactcttaggattcctgacaacatctcactatcttctgggctttgcagtcttcccttccagtgcagacgtttagtacaagacatttagtaagagcaattacgggcaatccaatccatcaccctgcagcagaatttacaaggactcagcacagcaacaagaggctggcagtatcgtgatgggtcttacttaggccatctctgctcaggctttgtcctgcagttcatcagcaatcacttgcagctcttctccttaattagcacattttaaagactttgttagttccctggctatgacacaagctaggtttcgccagtaatgtactgattctttgtaaagtgccaaagtcttttccctcaccttgactttgattgaatgcagctgtggatgaggctggtcagcagtagttgtgttcctattgggttccctgttctctgggcagaagggcacatctgtacccggtgggaggtggtctattgtgacaggtgctagtgttatgcctcagcagggttggcaaccatgagaagccagaggtatgtttgtgttccttactgggaccagctgtaagcattggcatcattaactttgagaaccacctccttatagtctcttagaacaacagtggtcccctactctctgaaatttattaggagggactctcttaaatgagagtgggtatcagtatgacttttagaaagctacaatgcaatatgtggggctgggaagatagctcagttggtaaaacgtttttaaagacgagacttcaagctgggtacagtggtgtgtatttattatttcggtgatggtgagttgaagacagagatggtagcttcctaggcttgatggccagccagcctaacctaatggacaagtttcaggacagtgtgaaaaatagtcacaaaataggtgggtggccccaatagtatgccacctgacactgattgctaggtccacacacatgttcacttattttcatatgcaactgtgcacacatacaccaagcaaaacaacaatagcaacctagtgtctcattgaagtctggtttccatgaggtagaattcgggagtcgttgacattccctgtgggtcagtattccaagtcacatgtaaaacatggcccatgccccagaagtgggctgcctgtgtccccaggtggagatgactattgctgtggcctctctatcctagtgtgttgtctctattcttgaatttcacattcttcatgtgtcataccacataggaacaatgggttttgatagggcaccacagcacggcagaccccaggcgctcctggctgaggttgcttctgcattgagaagagcttggcacattatctcttgcagttgtgcaacatcccttgcacacttacctcttgctcttaggtgtctgggtcaatgacacctttgtgagttacggtatgggtatatttgtgcaaaattatttgagggctcacatacctgtgtcttgacatggaccagtgcttgctgggtcctgtgcttgaggtctgtccatatgtaccattggatctccacataggcacaagcacatacttgtggtgagtaggaaaggcctggtgagcttgatttgcttttacctggtgtgcccactgccactcattctacctgtgcactttcagtccacttggttggcttactacttagaatctttgactacttttctgtcctccaaattgaatattttatctcagaatatcatcaactcccctctttttgagacagggttttactgtgtagtccaggctgatctcaaaatctcaatcctcctgactcagtctcctgagtgctgaaatgacaggccacatcaacacaccctgctgctttctcagctgacattccctctgtgtgagtacacacttatcttccaggcatcggctctgaggtctcgcagcagtaagctgttagtgctttggtttcatgtgggtacagaaggccctcttttccctggatcattaaggctaaggcttccttctgcattttcccctttcatgattttgactttcatgtctaaaaccatccgctgtatcatttgctacaaaccccatgtttttgttgttttttttttaatctgcattaatcttgtcagcttacactcctcagaaacctgtctgttattatcccgaaggctggaagggcaaggagaggctgtggtgagctccatccggctcatcttctgcagctgtcttcctgtggcagctctctctaaccccagagctgattgatggagtaggggtggggtgggctggggttgtgtttgcttcttctgactccatgttgttttctgtattgtgtgatgttacttgatattctcattggtgtgatggaactcttgaaaaacaccaaccgataggaactgggctttagtcaggtcactgtttgagatggtgtggtctaccttgtcaaggaaggcatgccagctggctgcttacagctgtggcagcaggattgagagattgcttttgtgcatattggtagatcaggaaacagttcaggccaggctgtactgcataaggcccaggctctcaaaacagcaccgttcaccagctggggaaccacgcattcaaacatgtcttttggggacatgtaatgcataccaaggactgccttctcctctcagcaatcatcctcagtgaaggtccctagtgcccatgtttggggcccctcctcccgtcagccctttctctttggggtagaccatactacttacttaacatgggacaaaattaagggagatgttttatggccagaagtgaggatggtgagacagccttcttcttctgaagtgttggtgatagatatgacttttccttctgtagggtccagaaaatgatctgtgataaccacattttcaggttttttaaaaaaaatatttgttttatgtgtatatgtgtgtgtttgagtgtatgtatatgcaccacatatgttcaaaaaccgacagaggtcagaggggcactggatcctctggagcaggagttacagattgttgtgagctgtgcgtactgggaattgaacccaggtcctctgcaagagcagccaagtgctcttagcctgtgagccatctctctagcctacatttttcagttttgaatacatgactttgttaagcaagtagcaagaaaaagaaaagggaaaaaaatagcaagtagtggacaaggtgcaaaagatcatctatcatatcaaacacttacaattcccatagaggtgactgcagtagcctgtttgagagtacagaggaaaggtcatcacattggggtattacagcatcctgtagagatgactgggaaagttgaggcagtcagctagggggtcatcggttgagctttctttccacgaatgaacttattcttactgcaggtgtttttatgccacaggagacataatagtatgtctggtaggattggctcacctattggctgttctcaagaacgtggagtttttactgacgagctgttatgctgttctctgtctcctctttacgaagctgagagaacagggtcttagaggacactttgagacaatcctgcctgggtctgaagtgggggaggtaatcctacttccaaagctggcctctcagtgagctcatacagcacgtggcagtttacggtatactgtgcattacacctcccctctgccccgtattagcaatgatctccggcctccaagagcaaccctgggcctccagagctcgaggtgccaggatgggaagtttgaggagcaaatattcaaaggtctgaggtcaattctgagtgtcttctaagaaagttattaaactcgctgtgcgttgccgattgagtggcagcgccagcagcggtggagtcacacaatggctcaggaaatgtgttttctggctcctgctctctgagctgcatttccggcctctaatctgtgctcagcagatgggcctggcagggatctgctcagcagcagcaacccagctctgctccgctccgccgctgtccgtaagggtgtgtgggaggctgctgacgctccactcagcagctgccacattatacagccctgaccccaccctccactcctcacctgcagagttccactagtgctcaaagttcacagacctctttgccattggagatatactttgcatagttgtggctgtctgcagggtccctctgcctctatcttgcagctgcctgcttgtgtcttgtatagatcttcagaacataaatgtttcttactcacagtcacccttgcctgttaccacccagctctgtcaccattaggggacacagatggcctaccgcttacttactttgaggactggggttgtttcgggggacagtgtctctgccatagtgtaagtccatgtggaagatgacctatttccagactgattctcatgactgctctggggccgaggtctcttccgtggtcctacccatgagtaggatcgaggcaggggtgttcagcttctcagtctcttctgcagtcctgtacatggtcgctctgtgctgtgggccctcatcacactggggccctttgggtttcactgtctccttccagtgatgatgctcactgctgccagtgatttggagcctgaccgccctccnnnnnnnnnnnnnnnnnnnnatccctccctcccctcccccctccctcccttctttttttcccaaggcagagttattctgtgtagccctggctgacctggactcaagagattctcctgctcctgcctcccaacggctaggattaaaggcctgcatcaccacctcctggccaaaagttcaggagaaaaattaaatgagaaatacagcaacaaaatccaaggaaaacatccagcacagggccctgtgaaaactcctggtaaaaatgtagaagaaaacctgagcaaaaaaaatgtcaggcgaaacagtgggcttgctgtcttaatgaattcctgaggacacctcttccaggcacggagcctgcttttgttcccgggctttctgctttttcactcgtgactctgggtcacagcctccactgtcaccaagggcattgcagaggcccaggggcagagcatacccagtgtctgatcataacaagcaggtttcatgaacacattggaaaaaccaacttaagtaattagtggtaggctagaactcttagaacccctacagggtaccagaaataccctggtttctcagagggcttctcaaggaatggagaagcagatacccttctttatgcacaatttgcaggccatagccagtgacggggccaagttctagccctcagtgtactgctttgctcttctcaacagtgctcctctccagccttcaccacaggccccgtcactccatgctggcatcaccgagcccagacaccttgaacctacgctgttcttcccacttaccacctgtcgtgatgcctccctgccttgctcgcccagggacaccgtgctggcggagcctgccacccctctcacattgtgtacgtagaagagtaccatgccagacccaacaagctttaaccctgccttttaaaggtcacttctgtctcagtcagctcttaaagttcaagaggaaataaactgcttagagctggcatttctcaagccaagtgtcaactctccaagcctgagcctgcggggagaggaagtgagattaataaatgagtggccatgttgacatagtcatcggtcagcaagtgtcttcctgttcccagccctcaacagagtggtggacagacaggacactggggagtctcaaactcattttctcctcttggcttcacttctcagcctggggaacactttggagatatttattaatcaagtgacagcatttaagcccggatggatctgcccctcagtggtccctgtgctgagacgggtgattgacaggggcagatgatgcttcttgcccaggggagacgaaaggaccaaggaagttgcctcacccaactagttattgactttgggcttcaggccaaggacagggaaatcaatgggagaataaacactagaatgggttttattaatcaggcgccaccgaggcaggtgcagggatgatactggagcccaggggtcgattggcagcatgtctggtgtgggcgctcaggccatgctgactagcaggccgctatcgaccacgctacaccaggaacctcagcatcagactgctaattggactgcctggtgattccaaagagagagggagacattgctgagattactctgttttatctcctaaatgctcgtccgacttgactcagtctcaattaagctcacatccagctctgcccctcagggctcttctctcctgtagtgagacctgtgtccctttacttgtccttagacatggccatggaggtgtagcctcagttctatgctttgaatgacctccagtagctaaagtcactttagtgttgacaggcactccagtctggctctcctggacactctcacctcctatgttatgcatatatacactgatgtgctcagtaggtactcactcattcatacatattcttatacatactagcccatgacctatctccttcctcctttatacattgacatttacagttttctgtcagtatactaaagtaaccgaggcagctaactatattacaaagtttatttggctcagttctggagattgcaacacataattggcagctccatggctttgagtctctggtgatggcatgtgtcattgggtgaagcaagaccatttatgccacaagccagaaagtagagagagaaagagagagagagagcagagtgttaaaatcccctgtgactgtgtgttccttagagatctcctgacgcttaccaggctacttcctaaaggactgtccatactgctcatgacccaggacaacccatgtgtccttgatgacaggccatttctcggccatggcaggattcagtgcttcctcaccttcccatggatgtcctgtgttgagcgactcagtgagtgtgatctcctagggcttcccgtggtaactggaggggtgctccaaggagggagggaatgaagaagggggtccaacagtgcctgcataggaacagtctagccagcctcccttcccggctgctgttctgtcactcatgatagctccagtcatctctaaacttctggtctctctctctctctccttccctctcagactgaggtttctcccatcccctcgcatctaatttctaagagtctaagcccagagaagaagctaggttgtatttcagaagtatttggatgggagagagtatgggagtcagcctgagagtgatgtccctctgaaagtactatgacccagtgagcatctctgtgtctgtcactggaacatgggatgaagacactgccctccttaggagggtgctgctcctccatgtgcttacacttttgactgatgcagtgcttctccgtgtagccctgcctgccttagaactctctgtgtagaggagtttggctggccccagtctcacagagatctgcctgcttctgtctccccagggctgcattaaagatgtgcaccaccaccaccaccaccaccaccaccaccaccaccaccaccaccaccaccatcaccaccaccaccaccaccaccaccaccaccaccaccatcaccaccaccaccacctggcatgctggttttcttataaggacatagggggattgagggtgatctatcacagctgtctgtcttacctttatttctatcattcatctatgtacctgtgtacctattatttatgtttctgtcatgtatccatctgcttatatatgatctacttctctctatatatttttgcagtgctggggatagtctcagagcctgtgtatgccagactgcatcgaggtgtgctgcacccccagtctgcagtggatattttgcttggttagaattcttgcatatgaaggaactgtaatggggtcaggccagcagaacttctgatggtgttagtgcataccggctagccaagcaggaatgagttgggtcatcagtgggtcagtgtgtgaatgtatctgtgttttattctcttacttgagtttcaaaagagaacttttcatgtaggctggtggtcagtagcccttctctgtgaagggcatggaaggtaaatgtgtttgcttgtcagcccacacatgtgccattagaaaacaaccacagaacagtcagtgctgggtttggctgtggtccaccagactgtttgcaaagggagggaaggctgtttgctgacgtttaggctatagggaagagcaggggttttggctgagatctggcctagctctgccacagttgtgactctcctaagggtcacggtacccaactcttattctccatacatgttaaggctaaagtgacacgtgttagagtgccccttgtcacctgacacacagctgtgtcagcaatagcttcctcacctgccttttaaaatattgttttattttattttaattacttgtctctgtgggtgtataagtgatgaataagtacaggtgcccatggaggctagaggatagtagtggagagcagtgaaggccagaggggggcagcggaggccagaggggggcagtggaggccagaggagggcagtggaggccaggagagggcagcggaggccagagaagggcagtggaggccagaggagggcagtggagggcagaggagggcagcggaggccagaggaggccagaggagggcagcggaggccaggggagggcagcggaggccagaggagagcatggaggccagaggagagaagaggagggcagtggagggcagtggagggcaggggagacagtgagtgtgtcttctggaaagttacaggtagctgtgagcagtctatcagggaactttaggttaacccctgcttagccatttctaacatctgttcttttatatagcctgtttcagtgccatagagagtaccattgacctttgagtaaatagccaagagctgtgctttgtagccatatcttctgtctgaattatctgtttacaccttttatcccaaaagttgggtggagggcttgcaaggggagctctgcaaggcttggatgggtgatctgccctctggtgtctacatcttcagcagagactcagtgagcggcctgtggtaacccatcagtcaaattggattattctttatggttggggagcaaattgaaattgtgagaggtgattttccttctcacatttcaaggccagataagaatatttacttgtggcctctgtgtatctggaaatgcaaattgaatttggtgattggaattgatgtgatgtgaggaacggcactcatcagagtcagtgtatgcccaatgactagagaccagaaggcttcctcaccaacctcctcagctgggcctttggttggtaactttttaatctctgctttccctattctctggttgtctatacagtttggcagttcttttgattttgggatgtgtgtgcatgtgtgagtgggcaccagaaaaatgtgcaataataattgtaggttttaagaaatggaattgatggtagaaatacagacagctatgtgcaatgctgagctcttaacaagggtgctggggaaatgggctccttctgagtttgtatcaggctgccccactgcaggacccagtgcacagctgccacttgcctcctcctgtatttgggatccttacctctcctacagattccagaactacctcatggctcaggctagacataccgacataacctcctgaggtttgctccacatctgactgcccttagggtccattgcaaacctcctaagggtgtgccaggagcatcctttcaccagcagagccttgccctttggtaaggacacggggacagtgtggagcatcctagctctgcctgcagactcagtaatataggtatggccacctcgccttgatgctggtagcacttgtgagtgctatgtgctcagtgctggtgcctttgctgtctgtggtggaagttgtttagaaattaaataccttcctagggggtagctgggaatagacaacagtggccacctaggatgtgacatccacagggatgcagagcttatgtcttaccacatctctggctggcgtgtgtgaggggagtggggatggatctgtctaacctggacttctcccatcttctgttgaatatgtagctctctgttggctgtttttttccctgaaggccacacctaccagaaataagcctgaatcacccagagtctggttgtcagtcatactgactgccttggaaggtcctcctgagtggtgacttagcctgttgtgagattcctgccaaacagccttcctacctagggtggccctgagcacaaggtttctaggcactttccttctgtttctttgtcttttgtaaagtcccacctccttctcttccatgtctgctcacagggggcgtcttatcagaggaggctacctagcacactgttcctcttctgtgtgtctgtatcttggtctaagaaatcctgtcactttcaaagctctattggcagacccttccccaactccctgtcttactgtctgagagcatctgacatcatgatggtcactggaaaaaacgctcactgaccactacaatctgactccctgtggctttgttagggcttgccctaattacatgggtgagtatttcctgggtttagggatagggcccggtgcagactatagggctaatttattggcctgtcatctatttacttatcatttattgtccctgtcatctatttctggggccataactctgtctctggaaggtccctgttaattcttcactcactggacaagcagatttctgtaattttctttcagtttttagagactccctggtgggctgggaggaagcatggacatgctgaccccttcttgcccagtgcacatggtgtagggactgaaggtgactgctcagatgcctccggtttggggatccacattttgcacatttcctcttaacatagaggtagcgattgggaacctataggcacctggtggcttagttcctgacctgagatgttttaggtcagtgctgcaggctatgccaggcattgtgcccagcagccaggaggggcaagcatcttctagttttcctggtgcacacacagtggcttcgcagaggtgactcagcggcttaggtctgcattgactcatccgcaaacttcaaggttggaaatcatttgtgttagcaggttttgatctgtgttcctcagccctccaaggataaagaggtgctgtaggtttgaagaaaaatttactaatttttttttagcttcatgaaagagatgaattacaaaaaattcaccgtgtacatggaaattccattataatctgtaggagacgaccgctattggtacgcgtcagactgctttgggctgtcaccacaaaggctctgaagtgtctgtgtgacacctctcctcaagtgttactgaattggggttctattggtgtgtttgggcttgtcacagttgtgctctagttagggctcctaatttgcaagcttgtctttcctcaggggcctgcagccaggtggctgaggttgcagtgctggcagatgtgcgagtgaggaggggctgtctttctgcttggcatctgctcctgagagtctcctctaatgtccctcacctcatcacaagtgccctcccctccctggccaggctcctcccaacactggcatgttggtgattagggcttcacactgatcctcagttctcacagagatgtcacctacttcagaaatgcccttggccatggagccctagatgtcctagagctagctctgtagtccaggctggcctcaaactcacagagatctgcctgcctctgcctttggggaattaacagcatgtgccttcatgccagctttatattttattgcttagacaagatatcatgtagctcaggcccaccttgaatttgctacatagccaagaatgatcttgaattctgatcttctgtctctacctcctaagtgctaggatcacgggtgtatactactacacctgtttatgcagtgccagggaactgcaggctaggcgagcgagcattctgtcaatggtgctgcagcaccagccctcagaggttttcagtgttttgttttttaatttatttttttttcattaggtattttcttcatttacatttcaaatgnnnnnnnnnnnnnnnnnnnnnnnnnnnnnnnnnnnnnnnnnnnnnnnnnnnnnnnnnnnnnnnnnnnnnnnnnnnnnnnnnnnnnnnnnnnnnnnnnnnnnnnnnnnnnnnnnnnnnnnnncccactcccacttcttggccctggtgttcccctgtactgaggcatataaagtttgcaagaccaaggggcctctcttcccaatgatggccgtctaggccatcttctgctacatattgttttggttttaaacatagaacctgggcttggccatgaccgtagagacacatgaacacactgtctctgcaccacctggcgctccagcactggtttctatgtggtgtggtgaatgccctgcagaactcacacttgtgggggttttggttttcgttttttccttccagacagagtttctctgtgtaatatcccccatccctggctatcccagaacttgctttgtagaccaggctggctttaaactcacagagatccgcctgctcttgcctcgcaagcactgggatgaaaggcgtgtgacaccactgcccagctgtacttgtgattttgaatgagcgactttattaagtatataacaagtgactggacaagtgacagatacatgacccatccctagggaacaaacatgtagttgggtgtgcacaccgtccagcagacaccacagctggcagtttccattgagttttctcttcctggctgacctttggcttctctttctcactgaaggcatttttatatcacaggataaacactggtaaccnnnnnnnnnnnnnnnnnnnnccagccatttcaatagtatgacatttttactcttagactgtttagctgtcacaaagttaggtgggccagcgcagacaagaggcctcagaggatactcatagacagacatgcctggtctgacatggagcaggaggactcagtcagttgttagagccagcttctcaatgagctctacagcatgcgacaactcactgtatatggacacaccgtgacttggccgcggcttctttctcggatgggcaccgagctcttccttagagctgctctatggtagcacagtgtttgggaccccacagcatctgttgatacaggtatgctttcttgctgcatgagtgtgggtgctgggctcaaactggggaaggcaggcctcagggctggaaatgctaggtcagacaaggaagagctggaaggagcattcattgtcttggagaagtttgttaaaatgtctcctgccgctttgcagtatctcttggccaggcctggttccttgaaagtgtatattcttagtcctgtgtttctgatgaagctaacatgaaagtgagcggcagtgtcccgccacatccaaagatggctttcaaaggcctgaactcattctctcagcagatgctgcctcagaaaggcagcgatcgataaacacgctcagcttctccttgaagcaccaagagcttcgctctgaagccccagaggttcgtggaaatgccgctgccctcagagttcagcacgctgtggagcaagaactttaattttttatgagctttctcttctcttccttggaagaaaggctggagttgaatggagagaacctccctgggggccaggggggaggacaagagagagagacaacaaccccaagagatgatggggatccgtgttagaatgaagttgctcaaattcttccagctgttgaggctctcatagggcctgtagacccagtaggagaagtccccatttcaatttgagatccatgttaacttgatggttcctgtatctctgcatcctgtgtgcctggttgtctaggcctatctggtaggtgagacttgagaagcctggccgagagtgttgagagcctcttttggacatggtactgcggccctgttttaggtggtgctttatctatctgcaggcccttgtcccctccatgggatgcccccacctcctttggagcttgccagtctgtttcctccatggaactcctggatggagaatacccacctgttcccacacagcttcccatttctaagcaggacccaggatttctagagctttgccccttcactactgtctggcttctgctcacatctgtagtccaaggcccatctagacagcttttgtgtcccctctctcttcctcctgaggttttttccttcttgttcccgttcctttgttcttcactgcctcctggcaaaggactctgagtctcctagccaactcctatttccacacagtgtgagtgagtgtgccctggatataagagtgtttagcctttcatcccctaagtgtcccacacatctatcttctcttgtgcctgtggggaagagtcccttcaggatcttagggatctaacccaagataccaaattctcttcttttacttcatgctttctgcctcaccatggactaaatcattcctttcttcactgtttttttttgtttttgttttttcctttgccatggccagttaggcagcagtacctcagctctggagagcttggacctgtagtccatgtttgccataccagctgacatctagttagcctgctgcaggtaccagaggatgtgcaggaccctgtgcttgcctggctcacctgcaggcttcccatctgcttccttccacacacccttcctcctgcacaccatctactcaggtctgtgatgtctattgtacttaaaataccagcccctgcaggcaaccccacccagtgctttctcctcactcagagaccagtatgtatcctgaaatctcagaaggtatttgctgcggcctgtttgctttatgtgagctgttccttcccctgcagtcacctggttggtgatttatgcctgttttgcagccaggaggaactcagcctgttgatcattgtgctcagggcttcactgaagctctgcaaatgatgctccggagcgccctctctctgctttgctctgaactgcaatttatagtctaaccttgtcctgttggaaacctgggaacctattctgtctgggaactgaccttgggatctgctgtggcctgcaatcctgcctgttgtctggcatcttctatagaccaggcattcctcgatatctgcttctggcctccacagtggatgaaatgtgttttgttcttaagcgagaggatgggggggctggtgagatggctcagtgggtaagagcacccgactgctcttccgaaggtccagagttcaaatcccagcaaccacatggtggctcacaaccatccgtaacaagatctgactcctcttctggtgtgtctgaagacagctacagtgtacttacatataataaataaataaatcttttaaaaaaagagagagagagaggatggggactgagaagatgactcaccgagtaaaacacctgctacacaagcatttggacctaaattcaggtctccataaccctcatagagctgggcacagtgctgtgtttctattagacagaggcaggcagatttcaggggctcacttgctagctagcctggtcaaaacactgagccacaggttcagtgagaggccctgtctcaaaagataaaatgaataaagtggagagattgagaaggcattctgacatggatctctggcctgcactggtgagcacagacagtccatatgaaggagaggagcgtgtaagaatgagtgattgatgtagaccaggggtagtgcctatctagcaagcacaagtccttgcattagatacctaatattcctgaggggactctttttttcttgggaagggataaaaagttttctttataatctgaaatattataactcaggcctcctagatacccttaagactccaccctctcctgtggtgccatagcacaagcatctccctccgtctgccgtatgtgtagcattccacattgttacctaggtgcaaggctggcctgtgtacctgtggcactgccttccttaggtagcagagcctagcttcagagtgaaggttgggtagctggcttaggccaagtggtgatttcctgctatccagtcttgctgcctggttctgttccgctgagccctggtcttcagtatcccagcaaagtggctgttatggcatggccttgggcttgtttgcatctgggccaggtggatagggtaaggggaatgctgcctctaaattccactcttgggtttggcagtcttcctgcaaggctctcctgaactccctgctgaggacagtttatctgagtgatcccaaacccccaatcccaccctgcgtgtatgtgtcacctgagaagctgccttgccatgtctgtctctctgtacttggttcgtaagtagcagagcaaatgctgccattctaattaaattacccactttggagcagtgatttaaggtgcttgtgaacctccccacctgaattcaacgattcaagagtcgatttcacagttcttgattattaaattggtctatgaatagttttcaattgaactggaactcaaaatagccactttctatgtctgtttcccgtgaatatttgctcttgcctgatatttggggttgtgatgcacctagggtgcaactggcagtcagctgcttctcagtggggccaagggacagtgcaagacaccctgagattacaggattgaagcccaccactgtccctgatgtcacaaggttggctctgttttctgtggtcatgctggtggccagagcagggttccctgtgacacttcacaggactaggagtatcgcagtcccctgctgaagcatcataaatgtttgactctcattcactttcaaattacactttagctgtttaaatgattttactgagttataatttacaaaaccctgtattcactcagatgtgaaatagacatatttgcaggggtgtctgcctgacaaaagtgttatctgccacccttgtgaattcagattttcttgaaattgtgtaatcaaagcaaacaaaaataattggatgcagaagtaatctgagctgcaggtgtctcttgcaggccccgccccagattgtacattttcaaagtagcttcagtgttctggtcatggttactttgcctgatgccctgcttgtgtgtgtgtgtgtgtgtgtctgtgtctgcctgcctgcctgtctgtctgtctgtctgtgcatgattggcctgagacataatcaagtagtctagagagctggccaacaagtttgcaggatctgtctgcctatctctgcttcatatctttcttaacatcactgggcttacaggtatgtcctgccatgcccagcttattgatctgtgatccagctgaggatccaaactcagatgtacatgtttgaaaggcaaatgctttatccactgaactgtctccctagccccatgcctcggtttgcgagagcttttggcatctcctccgggaagaggtctgtgactgacagtgcacactctgtgctcctgcagtggccatcttggttggggggttggtcggcccttcccccgctgctcctatcatctgacctgtttctttctgctgctatggcccagtgcacgtgtgacagggcaccctgtgggtatttgatgagatccttgcccttgctttttgtgctttgccaggttctctgtaagaccagtgacaacagaggctgcactgggcagctgtgggactagaggggtggtagcaagggtactttctgatggtctttgctcagcctgggagtgaccagtggcccttagaagccttagtccagaggtctgggcctctgatgttggcagagacaattgattaaattgtgaagttgttggaatgtcatagggaaggaagtagccaaaccaaagaggccacagggacgcagtaggaaagcagatattgtaaagggaagccaggcttggtggcacaacctgtaaccctgtattttgggggaatactcaaataggagattaaaagctcaggttcagctctggaggcttagtgagatcctgtcttaaagtataaaataagaagagggcttggaatgtagcttagtggcagagcacttatttaagactgttccagtgagggtctgggagtgtggctcagtggtagagcacctgcctagcaggtgaggggctgggggcgtggttcagtgggagagtccctgcctagaatctccagagagaggctgacagccctccctgctcagtgacagaggtcttgattagtatgcctgaggctttggctttaatcctttatactgcaaaaacacatccatacatgtataaatagggaaagggaaagtagaggaggtcagatgccattgtctgggtatgttctgacatctgttatcacatggcaggcctagtacccagtgtgagccaggactttctccttcagaaactctgcaggcccagtgcttgctgcgggggctgttctccacacccgccctgtgctgcacatctgtgcagactgtgactcacatgggaagtgcttgcgctggcaatttagctcattcagaagtgccgtcttgaagcgcctgtggctgacaatctttcccattgtgtgtggagttgcgcttccctccccctcgcaccgtgttctgggatcaccctgggtgtctttgaaatccagaacctcctgaaaggcactaagtagctattcaggagcgaggaaacggacgaggtatttgcacgtgcagctctattttaggatgcccctatgggatacacagtggggagtgtggccttagttatgggggatggtcatgccaggcctcatggatctaccatcttcccttccctgcagtgcccggggtctggagaaggtccagcagcagctccaggatgaggtccggcaggccaatgcacagctgctggaggagcggaaaaagagggagacacatgaggcacttgcccgaaggctccagaagcgcaatgcattgctgaccaaggtacagttcacccagtgtgactgagctcacccatgcccacacagccatgcccataccgcctggcctttcctctctggttgctcatctttctgcagacctctgtgaagctgcatgtgcttgcctgtggtccatagctttacgtctccagtgggtatcccacctaccctggaccccaggccgggcccagtgctggctcttcctagctgcaggctgcagcagaacagttcagttaggctgtgtgctctaggtccacacttgagaacacactttcgaatggcagaaggagccatccagagcccggagctaaagtatacaaccatattttaggagactgaggcaggaaggggggtggtgaattgaagaccagtctgggctctgtaccttgactctctcaaagcacaagaccaaaaccagtctcccagactcactttctctgcatgtcttgacctggactggtgcagcacctcaagggagtgtttcctgtaagctggtcttcttagtggtggccagccttcttgccctgtgctgctagcatgagcagaggaagcaggagtgggtttcatcccagcatgatgtaaggatggccacctgtgtacagaactaatggtgtgggtcctcacagtgatgtgtatctcatggactttgagaacctaagaaaggaccagctgcatctgtccccaggtacatgaagatctagcatttgtgttggcctcacacacttcttcccagggctggggcagggctgggccctcttttcagccttcagggtccctgaaggtagcccaggaaaagaagtggctagattgtcttctcatagcagcttagttccagccttacaccttggcctagaagatgctcagcgtattggcatagttattttcctgcccagcgcctgtcagtgttaagcctatgtgatgggaatatgtggtcatggccctcagacttgacagtgcagtggacaagagcagagcgctcagccatacactcaaccagccctgacaaagacaaacactgctgtgcgcactgacacgggaggagctgtcggaggtgagacttaagcaaagacccagaggatttactgtttaccggagcagtgaagagagctgtccccatccccacagagatatggttcagggaagaaggctgtcacagagctgctgttgatgccaacattgcaggtgcatgcggggcaggaggtggcggatgtcctggtctgcgggcccatgggcagctcactgtagtgctagtgcaggatattcctgtgtggtgtgaggagacagttggccatgggaaagcagagtgtggtgggaaggggatctacttgagagacgtccttagtgggcgaagtgcttgtgtcccttgacttactgtgtgatgaagagagagaggtcggtgctgagaatggaactgctccctgtgacctcagaaccgttgctcagagggatagtcctgctgctccaagcactgctgaggcattagcacaccagccgtctgaagcccaaggaggctctgcagtgcaggcccaggaggcgaagctgcctgtgtatgggtgggggacacggagttagcacctgcccttttcctgcttctagccagcctgtcttgcttccactgtcctgcttccagcctctggacttctgtaccctttcctggctccttggagaaagtgctctaggggccacagctgtctcatctactttgtggagaaatcaatgatctgatctgggtatgtgtctgtagtgtgcccacatatgtacacccacatgctctgggtgtttcttgtcgactgggttccataacatttccatatgtgtatgcccatgtggttgggacattttttgttggctatgtttgtcccgtggctgctgtggctgctgtagctgctgtattatcaccagagctgctgtgaacttggtggctctttaggcttggtttcaggcttgggtgacaggattgctgtcaatggtgctgatgcactgtgacctttgttgagctcccatggttccccgaacagatgctgtgaggcttgtgcctagtgtgttatgtgggcacctctgtccttgacatttccacctggtgctcccaagtcaggaaatttccactctcctccctgaacatggaactcccaacggctctctgtccacagtggcctcaccctgacccatgctgcactcttggcctcactctgagtcagtgggaaggtagctattgattgcccgacactgactgattatctatactagctgtccctctgagagattcaatggatcaatacccattgccttcccagccctgggtctgggatgtagggatttgacttgctagccagccagaatgatgaaactattcattaggctcgtctggtgaggcaccaagggtgttgcctgatttcacaggcatggtataatgtcctctgtgttacctacccgttaaacacctggctggggggtatcttggactccagcctggcttactgtagtgggggagtgtcccgtcttcactgtctcaatggaagttgctgttagacctcaatctctaggtctgctcacttctgcctgaccttgcctctgtgcacctccagcccagcctcctgaggggatgatgtgggtcctgtccaacacccatctgcacagcctggaaccagctgtgctgctctttcttggcatcccctccaagggcctctgcctgcttcacattccagttcagtgcttggcatgcgcaattttgtctcgagacttttattaagcagctccagtctaaggagttaattgttactgatagctaagagtataattaccttggtaaaatatcatgactattttaagcaattgaaaattggcttctggcactgggtgaacacaaaccattttcctatttgaggcatgctatttccagtatgcactaatattctataccatagttgcagaatcatatttatagaatgtaagcaagattttatttttatttttttaatgaaagaaaaccttccacttcccctatttggtcatccaaggtccccagggtagcagtcactagggacacacattctagaaagcaggcctggaaagaggtgggttgctgggcccttggtggtcagtcccatctcagttagatggcagctgcagaggtcacttgattgtcatggtgatgtcctgccttagggcccctcaaattgtttccatgtgtttgtatatgtattgcacatgtaaattcttgttcatgtggatgtgcatgtagaggccagagatcaaccttactgtctttcctcaggtaccacccaccttggttttatatgtacatacatacgtgtgtttgtgtgtgtgtgtgttacatttatatgtgtgtgcaaattagaaaacaacttctaggaattggttctctcctcccatgtgggggagtcaaacagagtgtcagactgggctgcagagtgctgtgagaccttgtctctgagacagagtctcccatttgcctggagcttaccaaataagcttgacttagtgtggagtcccagggattctcctgcctcagcctccccaaacatgaaccactgcacatggctttataaatgtggattcttggattctaacttgggtcttcgtgcctgtaaagcaggcactttaccagctgagccctctccacagtctggactttggactgtggatagtgagtgttctttgcctgctctgcctgtgttgttgtgagcaggttcctgtagtaagtcccttggaggtgacagctgcctgtctttttttttttgtttgtttgtttgtttttttcaagacagagtttctctgtatagcccggctgtcctggaactcactttgtagaccaggctggccttgaactcagaaatccacctgcctctgcctccggagtgctgggattaaaggcgtgcgccgccacgcccggctcagctgtctgtcttttgtgcttgctgggagactcagctgttcccttttgtgaaatatcctttaaatcaagactcttcatagcttcctactgtctcagggtctctgctgtggtactgtggccttaagtgccacccataacagtggagctaatgtggcatcaatgcctagaagcaagtggcagacttgtccatagtgcctccctttttgagtacttgcatggtacgagctgctggcagacaggagggattctgtgctccctctgtggagggcagacaccatatctcaggtcagccccaaaggctggggggattccctccattcctcactcaaagggattgtgccttgaccctcctgtgtgtgagagctggagatcacatgtacttgtgggttcttctggccctggaaggactgtgggcagggaatgggcatcatgcccaagggtcttgtctcggtgaaggtgaggagaggtatggtgccggggcagaggctcatacagcccatcttgctgaatatttgccttggagtggcttggttttcttcctgctggaatgctgtcacgaggtcaaatgtgctcccatagacagtagagggaagcagtgtccgcttaaactctcgtttattggacatgtagccaacattgccattttcctccttggagagctccatagcaggtacaatgtctcctctgtccagcgctgatgggacgctgtctgcagatgatgccatgccagtaggaggctccctgggtgaccatccctgtcctagtcacctctggagggtgggagtagaaccaggcggggctcctctgccctgcccttacaccctttgctttatggcatgtgcttgtgaagaaccttctagaggcagaggggctgtgaagtggctgggcgcttccatgggtgaaacagaatcagagctctgtgggttgcttctccctagctaacaagtgtagggaaatcctcagtagggctctgtaggcttactgtgtatgtgttcattgttcagcttccgtgtgtgtgtgtgtgtgtgtgtgtgtgtgtgtgtattttactggtccagtgtctgtggcttcttgtgttgcaacattgtgctttgaaggtctgttctcattgacagagctcattcactggccacttctgtgattaggggtgaaaatcccactatgtacccatccattttcctctgggcacacctttggcctttcccacggtcttagtcagggcttctattcctgcacaaacatcatgacaaagaagcaagttggcgaggaaagggtttattcagcttacactttccacattgctgttcatcaccaaaggaggtcaggactggaactcaggcagggcaggaagcaggagctgatgcagaggccatggagggatgttacttactggcttgcttcccctggcttgctcagcctgctttcttatagaaccaagactaccagcccagggatggcaccacccacaaggggccctccgcccttgagcactgagaaaatgccccacagctggatctcatggagacattttctcacctgaagctcctttctctgtgatagctccagctgtgtgacacaaaaccagtcagtacacccagtatggtggtgctgtggaatattttggaacatggcactaggtacttgtgtccattgtgcctttattctgctgtgtgtattttcttctccccagcgagttttgtgctgaaggctgtatgcacccactgtagtgcaagaaagacagaggcaggctgctgcctatcctgatggccttatgctcccctcactctcaggggacccacctgcttctgactttgactgtggcccagctgtggagtcatagggcccctgctcttcttgtctgctttctgataatccatagtgagagtgatgttgtgttgtgtggacctcaaggtgctagacttttacacgtcatgttctaccatgtgaataaactggtacttttgtgcacatacttgaacatagtcagtgctatagcagacagctctcgtgaccatcgacatccttgggatggtagacgtcctaccacctgagtgccagttgagggtgccacctgcatccttcttctttagattcacaccaacaatccagttctttggcctctcgattttccctaggggtgagcaggtaatctggattctgggtgtgaccccttggatcaggataggaccctcttcacctgtggcatgccttcacttgtcaccgcctctgtgtctgcaggtgaacagacgtttttcattttaattgcaggccagtatatcgattttctctttctgccggcactctgggcgttttgattaagtatctctgctgacggaagtcaggcagatattaaaggaaatcttacagcttccttcaagcaacctatggttttaccttttatgcttgagtctgacaggcatctggaattgggtttggagtgtgatatgaaacgggtgcccagacttgttctgtcctctgtgatccacagttgaatggctctgctcttgaaaggggcatcctttgaccagtccatagtgggctgctgtaggatctatgttgtcagctccttgtgtctgtctgtgtcaccctgtctgattttctacttgagtataagtattgatatctgccatggaatcatccagatatgttgttctttacaattccttagctgcagtgacccaggcctgtgagcttagctagagctctagattagcatgctctatggagcgggctcaaggccagtttgagcaaaccagcaagaccctactgcaaaataaaacatgaagaattgcctgagtggggtggggtgttgttgcagacagggctaaggaggcaaagtgcagggatctgccagcaaccttcaggatccacatcagatactgggtaagtgggctgctgaggggacccagtggctaaagatgctctttgtcaagccggatgaccttaacccctagaaaccacataaaggtgaaagtgagaactgtttctactgactaacacatgagcactatggagtactccccaaataaataaagttggaagaaaagaaaacaagaaaggaaagaaggaagagagaagggctagagagctagctcagctgttaagcactcttgctgtttctaaaggatccaggctcagctccagcagtctcactgggatgctggaataactgcatgcaagcctagcttcaggggctccctcactcttttctgagctcggtggacactcacacaaacgtggcacacatgcaaacacatgtgtgcacacacatataaatacaaataaattttttaaaaaattttatacttcctgtacatgggtaaccctccacccacacacagattgcttgaccagaatgcttacccctcatacataagaccctggcttccatccctggggcagataaggaagtaaagtacgtgctcccacagatctttaggtcccctacacctccccatgtgcagctgcttaccgcccataagacactggcgggatatgattcagactgctatgagtttatgaatcattttgaggagaaatcatatcttggtgttgtttggttttataagtggcattaaccatccctcatttactgagatggtctttaatttttcacagcaagttttatagattttacactaaagtctgaccagcattgggttttcctccctattcaaggtgtctgctcttttttttaaatgttggatctttagttatgtttgtgtcgggggcagggaggaggagtagacgtgtgagtgggtgtatctgaggggaccagaggtgttggagctggagttataggcatgtgtgagcctcctgacacaagtgctgggaggtcaacttgggtccttcctaagagcaagaagtgctcctaacccccaggccgtctctccagcccccactggtggatttgaaagatgtcttaggagacttttcattttgttcatcttctatctatggctgtggtcaggcctgggcaatgcctcttatgactctgctaacctcagcacagcctggggagaacatgttggaggaggaagtgcctgtgcactgcccagtctgaggctgggcagcatgcgtgctgtggggttggtttgttttgggcagcgcatgtgctgtagggttagtttgttggtcacgtgatcttggagtcacggtaagttgtgatgatagagaggtgtccctcatgccgctgaccaagcttctcctggcgtattcctggagtggttgtactacagggtgagcatgggtggcagactgtgccatcctgtcatccatcagagcttacgttgattcatgaccttcaggatgtagagctatgtggccatgcctgtgatcctggttcctatgtcggcgagtctcatgttccaagcatctcatcaaagtagagtcatgatgtgggttttattgaatgctgcaccggtggaggccagagaacagccttgttaattttttctttctacctttattaaagggttctgtggttcactcaggtcacctctctaagctactccgctagcccattttaggctttaagtagtgagcggcaagcaaagtgttgctggcacctttcctcttagctttgtcttcatggtatcccatttgctgactcttaggttctgtgttctgtgtgcactgctgtggtcattgttctagtatggagacaccttggcattgtgagggtcacttatcgctgtgtcatctctggggctaggtgaatgtagaacttccacactataggtggcccagagagctttctccaccctggatgctttgggtgcctagtagcccagcccaccaccttctcccaggctgtgccttcctttgtatgttgtgtaccacgtagtcctgttagatgatttgtgattctcatccctctgcctgggtggatccttgcctggatgttcatttgctagagggcatcacggtagcccatgggtccaacaattgggctttgtgtgaacataagttgtaagtacccagaaatcctggtgtgacaatgctgtgctgagttgagccttttttgtgtgattgtgtgcacgtgcaggtcaaaggacaacctctggcctcttctttaattgctcctcacctggttttagagactggctctctcattaccctggagcttctctagtaggctaggctgactggccactgagccccagggctcatcctaggcactggggctacagatgaactaccagagccagcttttatgtaggtactggagatcaaactcaggtctttgcttgggcagcaagtgcgttactaactgagctgtctccttgacccctagactggtgtcttttacttaggaatatgacttcaaattcctccatatttttcttgtctggattgctcagtttaaaaagtcattggttaccattgcagtgcatggcaggcagactgcagtttacccagcatccatctgctgtacatttcagttgcctggattctagcagatttgaatacagtgcgtttactggcattgtgctctccagcagtagctggacagtgctcagctctgagttcttctggtgctagacccttctacatacctcatgatgcttttcatatacaggactttcctatcctcttgtgagatctccttgatgctaaggctaaagaagaaaccgaggcacagagacaggtggaatgggtgggaattcagagcagttctactcctgatcacctgctgttactaccttaacaacagagtcatggctgaatttcttgtttggtttgcccccacccccctgtgtgtgacagatatgtgtgcaaggatgaatgtactcagggccgaggatatcagtgtcgtccctccccccccccccaacatcaactccctgtgatttttctatgtgctcccacacattggggctataggtctgtgtaaccatgctcaactttttatatgggtacagagattcaaactcaggtcctcgtgttccataagcaagcactcttaatccctgagccatctccttggccctctgtagcttgttcttgttattgtggcactactcaccactctgggacctctactgagccttttgagtggcagccccctgtctccaaggcaagggtcaatgttaggtggagtctccctaggagctggagttgtgctgtttgctcagccaccctccaggcagtggcagctctcctgtggacctggcttggagctccaggctgggcctttgctaccatccccttcatcttctcactgcccctggggtgggggactctacccacatagaagggaattatcctggctgctgccttctctctgtggattctggatcacagggaagctgtcgtcgtcatttgtgaaatggtgttcccccataattctgcagcctcccgggtctggcagccacacaagctgtgccgcggtcctctttttagctcatccaattgaggtctaagtgaggcttagaggcttggctgaggctgctcggcaggagctgatgctctgtcctcttattttcctctcattgtgagccctccacagtctcaagccaaatctgcatgatatactctacacagttgtgtttgttcctatacttctgatgttgagggaaaccctcttagagtaacgaggcttaaactgtgggccttctgccactgaacagcatccctggccctttgtaaaaacttaagatacccagactggccatgaactcaagatcctcctgcttctctctcttgggtcactgggacagcagggctgtctaattaagcatgtctgggaatcctttctcttgactgctgttgagactgcgagtctcctgttcagcccttgggccatgagaggatctggcttcctaaacaggcattagttcctgaagacctcaagatcctttggagggtgcggcagctacccaagttgcagctctgacctcttttcctccttgggaagtttcagggccttccctgctgtcctgggcaggccgacctggcataggtgtgctgacataaatgtgacttcatgtgggtcctcagtgttccttggaagtgaacaaaggggcaggctctttctggggtgtagctcattgtgtaccctcttctcttgcccatggtacctgatatttctcctttttctgcttgctgcaaaggggaaagacttatcattttgggccttccagatctgatcacacatgagagatctgatcacacagacttgatttagagactgtgtgtgtgtgtgtgtgtgtgtgtgtgtgtgtgtgtgtgtgtgtgtgtgtagaccagaggtgacattgggtttcttcctatggcactctccacattatttgctgagttagggttagggtttcttgttgatcctagatcttgtccattcagctagtccagctagctggcttgctccagggatctgtttgctgactctgcgttgccatgaccacttagctttgcacctgggtgctgagggtctgaactctggtcctccttgctgagccacctccttagcactttatatgacttcaagtagtagaaatgtgagagctaatgttggagatgtgtgcactcatgcacttgtgcgctcgcgtacacacacacacacacacacacacaggtgtgtgcttgtgtacacactctctctctcacacacacagacccctgagtactcctttttattttaaggaagactgatatacagggagggtaagtggccatggggacactgcaggattcctccgtgctgtcccttgcagcttgcttcaagattgattcagagtgcttctagagtggaaccatagagaccctatagcactctgaaggaagatatacaccatgggggctgggtaagatgaacagagtacctgaatcattggggtggagcctctaccctgctggcctgggtgccatgactgaattgagaatcctgttcacctgagggagggccagagttctagaactgggtacagggatgtatctgaaccccacttctctgctcaaggtttcttgtgtggccatctagctctgagtgggaacatggcagctattgcgttccatgcacatacccctgttctgatgtttcttctcccaccatcagcggctgtgtgttcctttctgtctactgtaagcacgtgtgctgtgtgccatgctggggagatgtggctgtactacctcagccctgccattgtagacccctcgcctccatggcagctctgcctctgcacctgggtaacaagatggccccaaggctgcctcccttccttcctaaaaagatttatttacttttaaagtttatgccaggcgtggtggtgcacgcctttaatcccagcacttgggaggcagaggcaggcgaatttctgagttcgaggacagccagggctacacagagaaaccctgtctcgaaaaaaaaaaatgtgtatgtatatgggtgttttgtcttattttgttttgtttctgcctgcatgtatgtatgtgcatcatgtatgtgcagtgcttgcagaggccagaggccagcgtaagatctcctggaattggagttacagacagttgttagttaccatgtggtagtgggaattgagcctaggcctctgatagagtagccatgctcttatctgttgggctatctgtctggcccctaagcctggttttctccactctgcactgccagccctgagacacactgcagggaagcagggtgcagtgggatggttctgccataaactggctactcaaccaggttcaagcgtctgaacttttaagttcagaaagcttcttacttaaaagttccctccacttctgctaatgattccacattagcaatccatttggagcacctggtgggatgtcccactgcctctgttcctgcgggggaattgttctgtgtgccctgatgttctcttcacaaccagcagggtccacagcatggatgttcaggggtttgtgtattacctgctcagcaggccattttgggacctatatccagtcttttttggctggcctcaaacttgaccttaaatttttttttttttttttttttttggttttgtttttcgagatagggtttctctgtgtagtcctggaactcgctctgtacaccaggctggcctcgaactcagaaatctgcctacctctgcctcccaagtgctgggattaaaggtgtgcgccaccacgcccggcttaaatttttgattctcctacccttttccctctttggtgctaggattacagatatgtgccacttcgtccaaactgaactctggactttgtggatgcccaacaagcctctgcctttcttcctgcccttctgggtcctattttgtctgtcaggaaggaaagcattcatttggtctgggaaggagccatttgcaaagtcacttgaaagctgtccttggcctttgcattgtcccaccaagaatgccactggagctgggttgtgacaggaaaaaagttttcaaggagaaaagcaattttaggaaataaaatgagatcaaaacaaagtgccttttgttcctctccaagctgcagatggttattaagataggggttccttggtgcgggggcaggaggggtttgcctctggccactgctgctgatccatgaaagcaaggtgacctcatgcaggccatcccagggacctgatggggtccctctctaggtctcagatctgccagatctttacctgaccacccttgcagcccaccgttgcctcagagccttcacctgcgctgctcctccctccctcggcagtgccgtcaccttgcccggtctggctcactgacttccctctgcccttgcttttaacaggccctttggcacagctgtttgcagccagtcaaaatctggcaattgtttggctccctcttctgatgggtggacaagctgagggtgtagagaagtcacctgcaaaggtcatgtgcccaggaaggtctctgacctggtgatgaggatggcaagccaagcctcaatgctctcttctgccaagggcagcattcatggaagagcacaaacatgttgtcccagccccaaagattggtggccctgtacctacccttacaggatttcaggggcatctggagacactgcaaccaggtagcagttacagatgctttggtttctggtttgtttgtttgtttggttggttggttggttggttggtttgggtttggtgttggtttcttggcttaaaaccaactatttggaagatgtggcgattgcccttttggtttctcaacagtggaagaagaggtgttatcagtgggtggtggaaaacatggtaccctgtccctgctatcatccatccttccctgggcttcgctgacacattttgggtaaggatggtagccactcaggacctgctgtgggtcctggtcttggtgtatgatgtctgaagatactgagcctatgcggtcagtgtctgtctcccatgtaactccccccaccccatgctgctgtgccacttttcagtacatcccactccagtatcactccaggacactggccccttcagtactcagaacggcttctggaaatgagttggtctataccttggagaccacatcaccctgccagccctgtcattgtttctgaaacatcctcatggggatgggggcatgagggacaacagagatggcacagtgagtcaggtaggtgtagggcaaggtagagcctgcttctaggggaagatgttagtaggatgctggtggctttgttttctattaaccttggctttctaaaatactgcattcacgtgctattgatcttggtcctcagagctgttgtgaacaccctcaaatccaagcccaggatgttcatccactgccctgcatcatcctggtccagggtaccctttcatttctgggtattcacatcacagctcaattggagtttacagtgccagtgctaccacatgtggtggtacattcctttaatcccagcacttgggaaacagaggcaggtagatctctgtgagttcaaggccagcctaaactacagagtgagaccctgtttcaaatttcaagcagcaaccaaaaccaaaaccagccagtaccttagctgggatgggtttggagtctcaacacaaggctacacactaatgagaagggaggaaccggcctgggtaggtgcccagtgatggcttgagtctgatctccactcagcacaggtggtctatggcttagccttgttggggacatgtggccttcaatatccaggggagttagcaagacacctggatgccaccagaggcccagcttgtccctgtcactttggttcctgtcacagaaccctctttgcctacggtgaagaccttgtccaactttttcacacaatttcgaagaaatccaaatctttgaataaccttggtcctgaaaggaaaggcgctggctgcaggtgaaaattgatggtggtgctcaaaggcatggttccctgccaagacagcctctcgagtgcagcttccaaaaatagccgccacaacagtggcgctggaactgctccctgctctgcctggagcctgctccaaagacggcgagtgtgcggcagcctcccctgctgcctggccttcatgtctgcccttggcctgctgctgggccaggtcagcactggggctgctgccttgtggttcctcacataactggcttccaaggatcctgtgaggtccccaagatagagtgtgtactggctctaggtcagaaagtacagcaggctgcagaccctgggaggaggatgcactcgctcactccctcgctttctcaggctggctgcctcaaactgtactcagttctggtcgtcatggttggcttctggtatgtgtgtgtgtgtgtgtgttctcttagtttgagagctctcaatgtatttttctctgtagtcctggctggcctgaacttgctaattagaccaggttagcctccaattcaaaagaaatcagcattcaggtgtctctgccacctgagtgctaggattataggcatatgtcaacatgcttggcttgggtttttttttttgttttgttttgttttgttttgttttgtttttggaaacagttttaacctgtgtgtgtgaggtacatgtgtgtgttcttgtctttgttgtgtgcttgtgcctatgtatgtagaaaccagcagtttgtaccaggcaccttcccccctgagtcattctgagccatattttctgagatattgtgtctcactgacctgggcgaggctggcgagctcccatgcatcatttgccgtggcctcccttcgcagagctgcatgtgccttactgctctcagcccttagaagtggctgctcgggatctgatctcgggccctcacgctgatgtagctgactgtttaccagctgagccatctcttcaggcaaagcctgtcatggtttctgtgggtgaggtctttgctttacttttctcttatctgaggggctcagctacgtgctcactatgaccaaagcaaccatggtgcttgctttcatcaaaacaactctcttccattaactgttaccactttaataatcccgtgcatatgtgtggggggagatcactttgaaaatgtgactagaatttgcagtcttaatttgtagaagaggaagctgcatctggctcaggatgggttgctacccaggaattgagggtggggtagggaaggggcatctctggtcaggagcatgtggctttccttggcagctcctgtttcctccatgttgctaccccacttatgtcctggaggcagggctgccagtgtttgcacacaagtgtgaggatgtgtgtttgtgtacctctaagtaggctgtgttgtgcatgtatgtatgcacctatgggtgcatatgtcctggaaagcaggcatcttctgctgttgccctgtttttcccgtgagactcccatggaacattaaacccagaggaggaagactggccatggccatcgtaatagtgattaaatagcaataaaacaggatcagtatttacagacctggggtgctgcaactagagggtattaaatatcatccatcaccaagtggaaagcggtcgatagctggggtgccgtttggaactaatgttctttggcttaactttcccagcaaagacccagactggccccagtaaaatcccaggaaggaacaggggaagtcccattaaaggtaacatgccaccagcttgcttcagagtcctttctggggtttgcagtactgtcacaggggctaagctgtcagcttgcgctggatgacatagcgtgatcctcagtgcatgctcattactggcttttgccttaggtcagctcatcttgagcctgcagatccagggggaactgagaagtgattctagccagaaaggctccaggacccaggaaagagcagcgtgggccaaaggtggtttgactaaatgggggagcagaacgagagcagggctctccctagggccctccctcatctactgagcctgacagtggggttcgtccaatctagggtgttaagtggccaggcccagtgtgtggctgtgcttcccagggatttggggtggggctggagcactcctgcagtccctcttaaaaatgtttacacttttaccagggtggggcccaggggctgtggggtgaccctaggttaggggtcttgcctctcctttgagaagaaggtgggatattgggcctttgctagcaaaagacattgctttgtgcctttatgaagcctgaggtagtgtcactttggtgtacctgcggtggtctccagaggccatcagccccagatatctttttgtcagcctatattgatattcttctctgtgtccagtgcttggtttctggacgatcagagagaaagataaagagttccttcacttccaccttccagagatcttcagctttgctttgctaacgtagacgtttccagtgtgttaaagactccctctcctctgtctcccaagtcaggccaaggaggaaggtggtccatggccagagtgtctgacattgccagtggatgggctctggtgagaagggtgcttgggtctgtgctctggtgtgctctgaaaggctggctctctagctggggacactgcaaagcaggcaggctctgtggtcctgactaggtgatatcgcctgcccgtgcagctctagtccccagcatgagactggttctaaggcttggtggtttgtaagggacacctcctctcaggtgcactgggttagcatgcagccacactgcctaggagacgacccccctcatagtgccaccacccctgggacagggagaaagtaccatatgacatagggagtctgtgggactgtgccaccttctctgtggggatgcctgggcctctttctagggtctctaggtcattgttcttagctgcaactcagatctcctttagttttgcaggtcaggcctagctgatgtcaccttgggccttgcttttggtcatctctctgggacaggttctgaggtggcccttgcagagagaggctcaattgttaagtgataaattggcttcacattgctctcttctccttccttgaggagttctgttaaatttttcactttgctctggggtccgcaaatcccactaagtgaccgttgctcttctggagcctcctccggcgctgtaataagcccttataaagggctctatccacagcctgatggaagtctctaaataaattagatccactggttagccttcgccggtgatttttattaacctccggttaaagaaatattgctagctacagctgcgtgatttattccagaagaagccagcctcatttaagccgccgcgtgctcccgagaggatggcattatagaacatgcagagccagggctgacttgggggggtgtgcttaggggtagggaagcctttctctagtgaccttgggaggagggggcaggctcagtcagagtcttgtttctccaagagcagagcagcacgtgaattgagtgggcactcctttcctgccactgctgcccccggcatacctcctttgttatgtatgtggtgtggctcctggtttcctgcccttcccatcacttcctgtgtgtgccattgcccaggatctgtggtctggccccaggtggtcaagtcatgcgctcataagtcataagcctgcatttcaggcttcttatgaagaatgacacataccatgtagttgctgactggacaggaagacagtccaaggtgcctgggactcagtgtgtcagtcccacctctagccccaagctggttctgaaactgctgagctcacttttgccagtcacctgaatgatggtccacaggcacttgcagttctctacagcagggtctatgatgtaaagacagtttcatctctacctcctcccagaggcaggcctaagatccttcctgagcccagattgctgtactaggccctgactgtgaacagcactcaccaccagcacacagcagcctgcagaatgagtgggcagcaatcctcccaagagttcagtggtcccggtcacttagtcctctctccggcagtgtcatggatgaagagtgtgagccaggtaagacactgacctgggagtcccttgtagtctggctaataggaacttgtgttggcttggccacaggtaggagttggcacccagcctgtagctgcccctccccagctgcagcttgcagagggctctggaggaggtggctgcatggattttcagagggttaaagttaattaaagagctcttccatgctttcatttccttgtctctgtcagctatttacatgcaaatgtgggcctgccattgaggcctgcaaaggtgtcagcttctctgcacatcaagggagaaagtagcccgagcctgcccagcccaatgcattgcattgtgtttgttacacgccactgtggacagcaaggagggggcccaagcatgcttggaagtcagcagcaggcttctacccctgactgtctgtgtgtctgacttgaattttctccattaaggctgcagttcgcactgtgtagctgaatacattatgcatggtaatatcttcacataagcaattttataaattaggaggatgcagagagggtacaaactttctgagttcagggctggtgcttcccaggggtcctcttcctggccaggttatccattagcagtaagagttagaggtatccttgaggagaggtagctgtggtttgcatggtgtcctgaggtgcatggtgtcctgaggtgcatggtgtcctgaggtgcatggtgtcctgaggtgcatggtgtcttgaggtgcatgttgagtgactaaatgtactgtgtgggatgtacgtcactgcagggccggaggccatgatgctgacatgagaaggtgggtggtggctgatagtgttcattcttttttttttttttttttttaaagatttatttatttatttatttatttatttatttattatatgtaagtacactgtagctgtcttcagacactctaaaagagggagtcagatggttgtgagccaccatgtggttgctgggacttgaactccggacctttggaagagcagtcgggtgcttttacccactgagccatctcaccagccccgatagtgttcattcttaataacaggtagccccctgctgttttttctgatctctgacaatgggcacaaaccagctttgcctctcccttagacaaagctaggtgtaccctggggcttgttttatgggcagattgtcaagaagacaacaagctggggtggcttagtgttgtgtaacttttcctggagagacacataggaacatcctgtcaaagcatatggtgtgagtgacagaccaaagtactacttcaccaaaatctagcttggtgagatcagttcgtttattgagctttttaaatagtgcacaagtgaaaggttataggggcatgggtgaccacagagtctcaatccatcatggatgcaacctgtcatgtctccatagatcagaaaagaatgacctcagtattgcacaaagaaacaaacaaattgaaagtagataggtaaggcagttttattttgcaaaaagggtgagatgtgaccaaagctgggctttagcataccagactggaaggtcacttagtttatttaacacagtgatgagagcggccaatcctggtgggacttgactttacaggctgacatgattggctagttggtacaaagtggggagcacgcgcgtttctcaggatcacttgcagggtcagggaggggtggggtcctagtcagaatctcaggttgaatttagtcagtagcccctttatcatgacgaaggacctagctacccctgtaaggttgtgtctagttgccacgtctacagtgacaggcaacacttggttcagttttacctcttagtagctgaccttagtgatgcatggcgcctgtacacctggaagaaaccctgtccctgaggcaagggaagggcagtagctctgttctctgcctgcacagccagatgtggcagcagtggtgaacaggctcattccattctccactgacagtggaggagagctcatctctgttccatttgatgcagagatgactggccttttcaaagggatactaggggagttgggagtctggaaaatgacaatttcaaaagtggttaagaaggttagtcagggtgaatacaaccagacaggccgtatgctgtcacacccatgagagttagggacccctcactgaacctgggagacttagacctgttcttcaggtgaaggcatttctaaaaaaaatgctcttaactctaggagaccagcccactgacttgtcagagggacagatatgggtgcagtgtatagacacctcttttaaaccatgaggctgtgcaggtcaggtgcttggcttctgctggcttcactagcccaatgggatgctcccctccccttttatttgtggtgctggagactgaacacaggactttgcaatatcaggcaatcagtcactgagtctcacctgcaaggccagcatgttcttctgctaagccgtttccctaggctctaccacagagccctgtcccctgccccctgcccaatgcttgtcactttggattctaggcagacactactgctgagcccagccctctttctgactttgaacttgtagccctggtacctcagcctcctaagcaggcaaacatcaccaaaggtcagctgtctcccactggcagaacatgctgtttcattattgtgctttttaaaatgatgaaatctgttattaagtactggatagcagagagataggaaccacagtcctaatagagatgtgggttaaatgctctggctttctcagacaaaagaacaattaccagcccagcctcttagacatccaggatatgggaatgctggcctgcataccccagagtgtgactagggtctttgcctggtgacagctgcattgtgttctggggagagcattgtgtccttgggagtacagactatatgagttgagtggcatatgtttacatagtagtgagcagttaaataggtgggtggcaggaggcacaagaccgggttccctctgctggacttggacccatgtggagcaagagtggtcactgggctgcaggtgtagagccagagatgccacgaacatatgtcttgcttactagagaggcagctgcattttgagtaggtatccctacccaggttagcatgcacccttccttgccctgacatctgagaacacccagaaagtggcctgtaggacaaacttctgccaccaagactaggcgagaaatgttaagtgttactgggcgtttgttggagtgttagtgcacagtgtactcacaccacaatcttcataagcaaatcaatcagggtatattactgcaccctgccatttccagaacaatagtgtaagctgtggagggctgagaggcagtgctggctggccccatgaatcacagacccatgtgtctgtgttggccagtgtgagttgggcaacagacttgctccactcgagtgtctagtgctttatacaacttggttgtcctccttcgagcatgatccattggctctctctctgtagttgtggcttaagatagtagcttccactccatgccatctgcagtgggaggtcagggccagctccagttttcagttacactgaagaggtgtcacctgacacctgactgtacatgacaaaacagtgaattcagccttttcccactgacttctgaccccagtcctcctgtggagaaagcaccaagcaaattctagtggtggggtatcttctaggccaccagagctatcctcagaatgggccaggtctccagaaatgtaggaaagccatcaaggttgctggggcatgttgctagtaggccatgtagtatggcagtgtggatagatctgggatgatgcagggcaggggccgtgggaaggggaataaaaggagtgggggaaaaccccaagtcccgccagaggtccagtgcttcgggcaggcggacgaggaaggatctgccgcatggctttctacagcccgggagtgggtgggggggtgtctgggtgtctggctgtgggaagctacagactcagcccgagggggtggacaaggggcagtccgcagtcttaggtacgaggttctcagtctcgggcatctcagacactgctggacatctcggaggagctgagaacagaatgggggtcccaggagtggcttggtcagccctggggccgaagggaggaggggggggagtgggcgctggatggttctcacacgggtgagagtccctggtccggtccgtggcttgagttcaggaaggccttctggtgggaggttagacacggcttgttaggtgaaagcctatcccatcattcaagcacagcgggccttgatgagcagagacagtctatggttttagagctttattgtagaaaggcaaggagaaagagagaaagtagaaagaaggaaagaggctggctatggccacgtggggagaggggagaagggagagagagagaaggagggctagagttgatagtaagaaaagtgagagcttagagagagaggaggggccaagcagcccctcttatagtggctgggctatcaggtaactggggaggagcataccaggctatgatcaggtaactgtgggggtggagtctagccagaatgccagaagcttgggacattgtctgtgtgacttatagtcacagaattatggagttgggggctctgtggtgtcagtcacctgtctctgggaacgtggtttgctttttcatcccttgtagagttttcttttttcttttttgttttttgtttttgtttttcaagacagggtttctctgtgtagccctggctgtcctggaactcactttgcagaccaggctggcctcgaactcagaaatccacctgcctctgcctcccaagtgctggaatcaaaggtgcgcgccaccactgcccggcctttgtagagttttctactgggtcacaagagcaagcctcattcaaccaaaataggctgcctttcacagccccacagggtgaagaatcctggagagcagggagcaggaggagggaggacagaggcagctggatgtctctgcataatctaggagccatcatcacctgtgccccaagtgtgccatgagtaacacggaggctgggtgtggcttgtgacatgtctgctatcttcctagtctttgtaaatctaaatcagttctgaaaaatacagcctgttactagggaggagaagccagcctggctcttttctggcagaggcttggggttgtgctgtctgctgagggtggagcctcctctgttggaatggtggcttggggaagagggcacatgggctggccacttcctacagtgttgatgcccacccagagacaacctggctttgggcttctaagagtgtgacatcattctgactattttccatgtgcccttgcagcatgtggcctctgaactacatccgggacacagcagctgtatacagagagcactagaccagagccttgtctttggggatgtgcacagtgtaccataggtctctccaaggcagttttccaagcctcatcttctagtctcctgtgacagctaggaggccagcagtgggttgcaggccaaggatttacctctgtatgggctgtgagaagcctccagcagcaggctgggcatctgtggatgtcgcaggtgtcagtcctagtcagatgggatgctttgtctagtttgtatacagcctttgacattgtgttatgatgccattatctacaaatttcaggtttgcagtagagttataaaattcccccaccccaatgcacaaatgtcataattttgaagtaagtttgtgatttgtattgggttgtattcatagctgtcttgtggtgcacatggcctgtggctggacaagcacagatgctgactcatgggttaaggttcctactggtagctccctctcacccccacagtagctgatacccttgggcctcacaccaagacatttgcctcttccaagatgtggcctcaacctttatgtttgatcccaatgccacataagccagatgtggtagttcatacttataatcccagcacttgggagatagaagcaggaggatcagaagtttaaggacatccttagctgcaaagtgaactggaggttagcttggactgcttgaggccctgtttgaaaaataagcaagcaaacaaagaaaacaaccaaaaagaagtatggaagccatttggaaagcccgtcacccttccccgagatggaactgaacacacagccgcttctctcctgtctccatacttattctccctactatccaggtgctagggtcagatctgcttttgcagcagaacatggcatgataatgagtgcccagtcaatgatgtgctgcttctctgtagagatgtgtgcctcgaccttccttgtaatttgtggtctctgacttttcacctttcctgctggcatgagcaaactctggtaacttcccctgtcaggcagagttgctgggtccaaggtctgagtgtctctgaaacctggacctgtgttatgtgtctagttttccagaaggcaggagctagtgggtactcttttttgcctgggggtggggggtgcatcctccccacccaccaacagagggtttttctgtgtagccccgactgtcttcaaactctctgtagtccaggctagcctcccaagtactgggattaaaggcaagcaagcaccagcactgctggctggtgggtgctcttctgaggacactgccattttaccatccagctgtcgtgcttgagcaatggcttttactcatctattctcactcctctcgtgcttgcttgctagtttggtttctcctggtgactgtttattttggcctttgtgatagttttgtcacttggatagtgtttgataaggcacttgctgtggccctcgcatcacagtagtgtctgcttgtgctgctgtttccttggcctgcacctcttctgctagcagctgttaagggaggacgcggattcaccagccatcttactcggggatttcttgtctcactggtgttctgggaccagtacccaagctaccacagggactccttttgtcacctggcagtggagttgccagcaggttctgcctggggcctttaattctctgtctggttagccaaggaaggtgatgaagggatgggttgatgtctggctgccttcttccactgagacctttgctgggtttcatgctggggtgcatgttactcctgtaggcattggaattgtgacacagccgcagtgttggccataatccaaggtcaccctgctgccagaagcctctccattctctcaccctcatctgaggtacctgggtttgagaagaagatatctagaaatgtgcaagataggatgagtcacccgtccctgtggctgagcagtcacccttcaagatctttgtctccgtgagaagagtgctccataactgccatcccagtgctagtgatgactgcatgggccaccgaggactaagcttgcatgctgggtttgccgacgaaaagaggagcataggagttcaagagatggttcccagcacttgtttgtggtcctgagaacagcactgtttgacttggcccagcccccctagaccggtgcttctcaaccgtcctagtgctttgacctcacaatacagctcacactataaaattatttttattgctacttcataactataattttgccactgttatgaattgtaaaaatctgatatggaggatatctgatatgcaaacccttgtgaaagggtcgtttgggggccccctccacccttccccaaagtggtcatggtgcagttcgagaattgatgctccaggtgggtgaaggtgtccatcaggaggaatagctaggcttgggaggagccttgcaggaggggtaagcctgacctatgcagtaagtggagactctcaggaggggtggggcttgagtccaggcagtgggaggagccttaggttgggtaggcagacaggcagtcaccgagtgaagacagaattgtgattttggccagcactctgaggtggccagatgcctgtgatggcccctggtaaaccagctgctcagcagtataaaactgagatgttacagagttgtccgttttaggctcttcctcactggtaggagagacagaagcaagtggagccaagctgggcatccagggcatcagttgcattgactactgtaggccatgtcctctcaccgtcctcctgaatggcgtggaatatgcttgagtagcagtaacactgttcttggcctgaagccctgtcatagccctgttgccatgaatcttgtttctcacctgctctctgaggacaccaagggaggggccagctgttggacagttagtgtgactttgttactttgtgcctgttggtgttaccccaggaagatcagctctaatgcattgcccacagagccacccacaccggcatgaagagtcgctgcttgggagcccagggcccgctctgggtgggtgctgggaatgcattatacaagtagagtaaatgaaatggggtttgtaatagagcagtgtgaagcctgagtaagattgcttcgggaagtctcaattgattccctctccttcctatattaggtgttatagagctttttctcaggaggttgaaatggcaggaacacgggctgggggctcatggtacagagtgctgaggacctcctcccctgtctcctccaaccgagggctggacaggaagtagttgaggcagtgactcagggagggaggcttggcagggtgtgtggtgctgtctgtatcggttcctagccagaagaaggtagggggcatttgggcatggagctctcactttgtccctctgtaatcagtagctatgctagctttggtcacccagagggagccaggtacatttacaggtacagccataagcctgactgatgtgggtgtggaatgtgttggctgtttctaatgaggctccagagaagctggtgacccaggcggtggctcagcacactgtgcacttggatcgtggtgggtgagaggagcacactaggagcttacttatcacagttcagagaggagaaccttagaactgggaaggaggacttgcagctttgagggctggctgccaggtggtattcagcgagggtgctgactgtcccctcagcatgtacagtatttgatgtggcccacaagccccgttgtctccacgcctgcagagcatagtggctgatggtcaccaaatatgcccaggagcatgtgttgacagcttcctgcactgttggaagggttgagcttccagctccccagccctagcccacccaggaagcactacacatgggaacagatcagggaccttgtttaattgactctaattggcctaagtgaacggtgtgctaattctaaattagccttatctactcatgaaagaatcgaagcaagaaatgcgtttggtaacactttgttagagctttgttcaagagactatatggaaattaatagaattgcattttgctaaaattatcttctcgttccatcgtcatcagtgggactggcctcacccaattaaccacatttaatgagctttgatgactgtgaacacttttgtccccagagatgtttctcaacaccccttgttgagccatccactgggggcacatactctcatttttctcctaagtttttttgctaagtgcagggtatagagcagccacctttctctgtgctccacctgatgtctctgggctcctttctcacagtcagtgttctgcggacacaggaggacatagcgaggcctggtagcctcagttgcatcttgtagaccctcttgtctgacacttgagcatcagatgtcagaaatctggcaagcggtgaggtcaagcctagcctgggcccagtgccacagctgatgtgagtgtaggctggctattctcagagctctccccctttccaccttttcttgtctcttccaccattagtgatgatcttagtacccagattaatcctaactgtggtccctgctcaacacccttgcctcccatcttgctggatcccacattgccttctcctttccctttgcatcccaccccccaccatgaatgctcgctgggcaacactgtgtgagggtgcctagtccttccagacttcatactgggacagtggttgagcaagaaacttagcctcaaatggatgccctcagttcagccgactgcacagatgcttcctaaataaaaagtttcatgctaagtggggcatgatggtgcctgctgtaatcccagacctcgggatgctgaggtgggaggattagagtgtgatcaaggccaccctgggccacagcactctctctaaatgtactgtttgtaggtgacatcagcatgtctgtggaccctgcaggtcgagaagtaactagtctctgttatcttgttcccttttgccacccccagagccaaactcactgttatctttgcctgggtttgaatttcattttagtgggtacctatacacataactgcggtggttggctctttttgttaatggtgacattgctgggtccagaggtttcattccgccctctgagaatgccacgtgtctttccctcctgatggtgggtcttcctacccagctgcagtgaaccaaccgtgctgctgtgagttttctggcccagggcttgggcgtgggcactggctcctcacatctcacatgcactgttctttaggcgtcctccatgatgcttcctgactatggcgccctgagttccccactgtggggctgcattcctgaactgtggggggggggggggaacctctctcccttcagctgcttctgtatctgtctcagaaaacagcgaaggaatgaagacgctcacctcatgacttggatacagtgtgaatgaaggggctcacctcatgacttgggtagtgttttctttgacctgtggcccttctctggggcaacagacattccttatgactgccccctcctctgaaaatggcacacaacaaactccattgcccattcgatttgatgattcataaggtatttgatacattctggtcactagccttttgttaaataagtgattgtaaatccccccccccccgccccccgcccaaatctggaatttttttgttctttcacttaattgaagtttttagtttggctggacgctattctgctttcagattcctctatgattgctgtttgtgcatgtatgtcctgatttagaagcctttgctgttgcctgtgccttcagttaaagttgtggctttatctgccctgagagtcactttcacgtcccactgacaagattcctgactggagcaacttaaaggaggaagggtttattttagttggtgtttcagtggatataccccatcatgcatggtggctgcagctcgaggctggtcacctcacagtggtaggcaggagggagaattctcttaggacagaatgagaagtggatatcaccttcattgtcttcctcttgcccctccactgccagcagcctgcctctgctaggaagccacagtgctccaagttctcatcctctgaagacagtgccatgagctagaaacccagcgctgcctcttgagtctgtgttggaggcccaggaagggagaggtggagtcagatattaatgaagggtggcagaggcatcagaggaggcagccgagtacactcaccagcaggaggtagaggggagcaggcaaaaagcaacagcctttctctgagaccccttaagtttggggatagtagtactggaaaggataggtttgtgttggcctgtggttccagagggaagtagtccattggggtgggaaaggcaggaaatggggcaggagtaggaagttggttgagtaatttttcatccacacccaggaggcagagcacaagtgcaggaagtaaggtgaaactatgaaccaccaaagcctgcctcttgctgcacttcctccaggaaggaggaacctctaacctccccagaatactgccaattggggcccatgtgctcaagtacagaagcctatgggggacattcttcattcagactgcctcattgagccactgccagaaggtaccatgtaccttgggggagggtctttctccttagttaatttatctaggaactaccctacagacctgccttgagtcatgttgattccagatcctgtcaacttggcagtcatggttccttcttacacttgggctgcagtgtaagagttttaagtgaatgtgcctgggattcatctagggccttgctcagcaaactgtgtacactgaactgcagcccctgtcctcttgtgcttgattttgagacaaagacttattaacttaccctggctggccttgaacttgccctgccacccaggcagcccttgaacattggttcccccttccttgatgtggaaccgggctctgtttgtccttgatgatcttgctctggcccagcggcacggctaagcacacttactttagtaatcgtttgtagattaagtcggattatctgttcacagtgtgtcgtgtgctggaaatccccatcaccttctttcccagcctttatacttctgagaagctcaactacgactgctttgaacagaggggttagtggctgagtgtccctccctaacagtctcagctaagccagctatacatagctgttagaattcacactgctctgcaggaggaaatgtagccattcagcaggctcgctagtctccatgtgctaggaggcacttttgaaattctctttgaacatttaccttattttattcactatgtgtatgcatgtgtatatatgtgtgtgtgaaggtgtggtgtatgccatatagcattcacgtgaagatagcttctgagagttggatctttccttccaccatggagtggagggtggaactcaggttatcagctttacagaacaagtgctttgacctgctgggccatcttgacaaccctatggaggctcttttttattgccttgtttccatggtgaatacgtatcaattataagcaaatgttttttctgcaaatattgaaactatatgacttctcttacttcttctgttaatgtggattagctttctgactttccaaacatgaacccacacagaggtctcaggtcagagcagttctctcttgcgagctgtgcattgctggttttgcttagccatctagctgaggttccggatgagtgatgcctggagagtctggccatcaggttttgtgctgtgagttttctggaatagtctgtaagatacgtgcctacttcttccttaatgatctgatggaatacaccagtgtgtaagttactggtcggcctctaggttttagccatccacttgcctcttcccatcccatccctggagtcacagattcatgtggccatgtgaatttaagtggatgctggggatcttaactcggatctttatgcttgagtgacagacaggtttttttcccgtggagccatctctttagcctcagcacttaaattattctttgtgtgtgagcatgctcctgtctgtgccctagtatgcatgtatgtttatgcatgtagaggctagaggatattttcttgaattgctctccacctttaaaagaaagatttatttttatttatgtatatgtgtatatgttcatagatacatcacatgtgttcaggtaccctcagagttcaacagagggcatcagatcccctagaactgaagctacaggcagttgtgagctgtccaacatgggtgctggaaatgaactcaggtcttctgcaggagcagagcagccagtgctcttaagccactcgggtatctcctcagcttccactttgatttttcagacaaatctctcaccaagcccagctttgcatgagtgcttaggatcctgactcgggtcctctggcttgtagagcaagcatgagccagcactacattttcatttaaaactttttttaaaaaaacttaatgtgtataaattttttccctgaatgtgcaccaagggcaacaagaagaagctgggaccagagttacagacagttgtaagcctccatgtgatgctggaaatcaaacccaggttctctgtaagagcacccacccagtgctcttacccgctgagctacctttgtagcccccctttcctggtgattttactattcttctactgtgtgctgcttccagctcacttttatttggtaatctatatttctttattaacttcatcaagggtatattaatttttccaaaaagatttctcatttttatttttaattatgtgaatatccatctgtctctgtgggtaggtacatgtaagtgcaggttcctatagaggccagggcaggtgcctgtggtgtctcctggagctatggtcacaggcaggtgtgaggtactcaatactgatgctaagaaccacacttaagatcctgtgcatagcactatgtgctcttaactctgtgccatctctcaggcctaagggcttattaattttattagtcatttgaatgagtcagcttttggctttattaattctctatatttattctgtattgctcatttgcttttcctatcactccctcctttctatggtgttaattcgtgtttgaatttgagttgtgtatgtagccagttgagtctcattcttctctttggatttctgctcttaaggctgtaatttagttgcatgctgtgcgtttgatatattacatttttctcattgtattaagcagccttccatcatgataacagattgccaagattgtccttatgaagaggaaaatgcttgtttggtagttctatgctgtaacagattatggctttagattgtggccagtccagacatcttgggcaagcaggtggtgaatccaagccattcaccttcaggccctgaagccaagagttgaaaaggaagagcctggcattcaacagtgtccttcacgtcatacccccagggacctcacttcttttcattggccctacctcctaaaaggccagctagctccaagtagcacagcagactggccaccaagccttccttctatacatggacctttggtgacacttgcaactcaaaccctgaaagagtttggaagtttatctgtttcaattgtgattttttttccctttaatttaaccaatgagttgtaaataaaattcttaatttaaaactacttgctgggtcttaagctcttgaattgttgaattctactataattttcttgctctcaaattatgctttgaatggtatcagtaaaaatttaacaagatacatggctaggaatggtggcacacacttattgtccgagccctctggaaatggaagcaggaggattactgtgagtctaaggcctgcagaggcctagtgtgactctgtctaaaataaatgttacgaacacctgcttcctggactctcgtgagacctcatggtagtgtgtgtttgtgaagcttctgtgtacatggagttgaccaataggtcggtgctgggtgtcattgcttgagaatgctgtgtcagtggcaggttgctctgttcaactcctctgtatcccagagaagcttcctttggtctggttctttgtggtctgcctgactctcccattagccatgtcagttggcatcctgggtctgcagatgctgtttttaggcgctctatgctgactgaaaggttcagcctgccccaggaggcttccttttcttcctatgaactcatcttcacctgtgggttcttccagcgattaattttctagcagtgatcagcttccatttttaaatctgcacctttgctctttccactatcattggaaacctcatcatttggttacagacagttctcttacaaggggaatatagctttagtggctttcttcagccagacaatgttttttgtacacttgaaatatttaatttagtcgtcctttatataatgagaaatctactaccctgtgaatgaatcagagagaatccaaggtcttccgaatgaatggtatgtattccaccactgagccacaccccagcctctcactgggggattctaggcaggggctcaaccactgagtcacaccttagctcctcacttgggggttgtagcaaggtgctctactattacagtcatattccagtccctcattgctgagtcaggctccctgtcccttgctgggagattctggtcaggggctctactgctgagctatgtccttatcttaacacatttgcatttaaatgatatattttacagttgctttttttttggagccccgcccctcctttgtactttgtcacagaataaactttcctttctgttttctctcctcattatcctggtcacctggtgtgcttttatgtgtttcttcttagttgccttactgcttatgagaagataggctgttattaactgagtctagtaaaaattagtacactcctctcttccctgtatctggccaccttgagccatttgctcctgctttgttcctcagccagaggctccctgataagaaggtgtagatatactgatgtacttacccagtgttatgtatacttagagattcagaaagtcactgtgtttttagaaaaggatgtctggctcaggctggccttgactttatgtagccaaggctgaccttgaacttttggtcctcttgcttctgcctcctgagttgagattacagctgtgtagcactgtattgatgtttatatacatttgaacttggcagttgtacctagtagctttattgtagtctgtttgttataattagtgaaccagtatctatataacctatgtattatttagttaactcatggctgtgccaagaagcagaaagagtgcttttaggttcagtccgttatggtggtgtcagtaggtggtggcagctgcctgtggttgtagcaggttgagtataaggctgagtgtccacatatgcatggatcccagcccacaaagtgctacagtcagtcctccctgaaaacacctgaccagcacacccaacgctgtgtctcagtcaggcccaggccacctccacccctctctccaggagagtggctatatgcatttgattgcagttgcctgcagaggtcagaggtattggatccctgggattacaggcagtttgagctgcctgatttggttgctgggattggaattcaggtcctctgtaagagcagtagtaccacagagccatctctccagccctttgagacttttattagtgtaattaagttgataattggcattgactatcatggtcttacttaaggttaaaagcacatagcatgcatccttgtgctatgtaattcttctcttttcctaaacacatggtgcatttattgtattgtccaagcctgagtcaagtaatcctcctgcctcagcctctatagagtagctgggtctacaggagcatgccgccattcctatctagtggtgagggttttgacttgggcacattatagagctctccttacagcagctgtaggtcaccagttttgtctcctgaaggcttgcagtgaagtgatcacctcccttgtggaatcaggagatagtagccatctagtcgctagattctaatgggaccttgtgggtctgctgctttccatttagaaaactcgtgttcctttaaaagaaacaggctatcctgtcacactgaactcctgtcaggagtcactccaaaagcaggatggattccagcaaggggctggctgtcatcaccatcttaggtcaggtcagtcaggtttgcaaggaaagaggcagaggatgggactgaatgcatttcccccatgacctgggggaactgatgcaccacaactgcagtccctttgtgacagtgaagcctttagcgagaagtcagggtgccatgtgttcatgatgctaacaactcaacccagagccaggctggtttctatgcgtttcagtaaagaaacccagtgcctgggctggctggacactggcttggcttcaggcccacagggatgtctaactggcctgctcacagcactactgcactctgtgcgccgtagctgggaccaaggaagagcaggcactggatgagcccaagtgttgttcctccctctttgggttttggtagccgggccccattcaagaacttgtgctctcccttgtgagctccagctgctcctgcttcttgtggtagcactctgagtgttcttctgggcgtgtgtgtgtgtgtgtgtgtgtgtgtgtgtttgcagatgtgcatatgccacatacgcacagaaaggccagaggacaatctccagtgttagacctcaccttccacttcatttgaggtggcatctccttttcactgctgtgcaccccaggctgctgctccctgagcccctgggattctctcatgctcccctccctgcttgttctaggaacaccaggatcactgcaatgtctggctttgcttagtttctggggatttgaagtcagatctttacacttgcctactgagccagcttccctgccctcagtccctggctatactttcgcaggcctcctggactgttcagtgatccagccctcactgtgctcttcctgggttctgtgagttttcactcatttctgttcttgtctgtattcttttctttttcttgctttgggctcacattgttctcctttgcatagtttctctcctggaagcttaggtgattctagacctttgtaaaacacacatgtaagtttctctctgagccccgtgcttactgttttctacaactctcagtaaagttgcattgctttcttattgttccaaaccattgttgagtttttcttgagtagttttttgttgttgttgttgttgttcatttgtttgttttggcctgtgcattaattagaagtggtttgttaatttctatgcatttgggggcctcaccctcagctcttttgcagctggtacccagtttaattcagtggccacattcttcttttgtccattccctgtggtggtgtttctggccccagtgtgctgctttgcaagtgttccctgtgagcttggggaatacgctctccatcaccatcaggcaaggtgattgatggcacagtttgggtcagtggtgtccttactgattttctgcctgttccagatagagaactgttgaatttttgacatgtaccaggaaatcatctgtctctctctgcagttcaatctgtttgtgttgtgtgcatctttgcattctagtatcagtgaattagtgtggagcgtggtcatggttttctgtcacagtgacccttgtaatactgtagagctgggctcctttcttgtgctttttccctagtccattgacatgcagaaatgtagtgttgggtctgggtgtcttcaagtgagttgcaggtgtctttggatgccagaagagggcattgattctcctggaactagagttacagagggttgtgaaatgcattccaagcattgcgggtgcttggattcactgctgagccatctctgtagcccaatgtttccaatcttcctaatgcttcaacccttttatacaattcctcctgttgtggtgaccccctcaccataaaattattttgttactactctgtgatggtttgtatatacttggcccactgagtagtaatattaggaggtgtggccttgttggagtaggtgtgtttctgtgggtgtaggctttaatacccttgtgctagctacctggaaacaaggctctagctgccttcgaaacaagaggtggaactctcagctcctctagcccctcatctacctggatgttgccatgcttctattttgatgataatggactgaacctttcaaactgtaagccagccccaattaaatgttgtccttataagagatgccttggtcatggtgtctgttcacagtagtgaaaccctaagacatacttcataactttagttttgctactgttatgaattataatgtaaatatctatgttttctgatggtgctaggtgatccctgtttgacccacaagggatcataactcacagttgagaactgctgctctggcccctccaactctctttggattgtagttactggagtatatcttcctccatttacctttaatagatgtgtctttttgttcaaagaccacttcttgcagacagcatataattaggtctttttttttatgcactctgacagagtcgtccaaagtggcctgctcagattaattggtgtgcttagatcatgcacagttaaaatgatcgttgacatggtttacaatatcccgtgtttgttcctgttttgtgcttggtcactgctctttgttttctttctcattatcttctctacttcatctgccttgtttggttttaattgtacagttcttatcattcagttccccccacccccactggcagcttatgaattaggcagctcccatacaccccctatactggcttggacccagggccttgcatattgcatatgctatacaattgttccaccactgggccatacccccagctcctcactgggcagttccaggcaggggctctaccactgagccacaccccagctcctcactgggcagttccaggcaggggctctaccactgagccataccccagccactcactgggggagtctaggcaggggctctaccactgagccacacacatctcagcccctcactgggggagtctaggcaggtgctcctatactaagccgtacccaacccctcattaggtattggtgcaggtgggaggaactctagacaagtactgtactttggagccacctgcaacccccacgcctcattgtaccttgcagtccacttcttacattttactttgagcaaagatcttactaagctttccaggctggccatgatcatactctgtatatccgactggtcttgaacttgaagtctttctgctttagtctccagagtaatgggaacaacaggcctgtgtcactaggtgggattaattttgttttagtggttgtgtgagtgttggtcatagatatttaggaataatttagtccagggttgacaacactgagtcactttataggttaagggatgatctcaatcaggctctctgaaccatccttacttaccacccaggggcactgcagtcaactaatgcgctgactttaaaggtttacttttatcgtatttaggagggagagagggggagggggagtgagagagagagagagagagagagagagagagagagagagagagtgagtgagtgggtgtgtgtgcgtgcgtgctgtgggtgcctgaggaagccagaaaggggcaccagacttcctggatttgcagttgttcaacctaggttcttggaattgcattctggtactcaaaatgagcaggcagtctgtgcttttgactgtttttgatcatctctgtgatgagtggagcaaaggagagtcagctattttttaccttgccctcacttttccttcttgtccttgttccataaaggtggaacaagctttccaccttttgtggtggtgaagctcctgggactcctgtcaggcaggtctgatgctggcacaatgatccaggtcactctgtcttttcccttgacagatagttttaccaggcacctgataggtgggctgtttaaagtcctgtgctcaaatcctcttcacacttgtgtgcttcctgacaggaagctgcctcttgcgtccgtctgcttgctttgtgtgtgctcatggacgcatgatggtcagtggacgaccattttcacaagtcagttctctccttgcaacttgatgacacagggtctctggtgtggtttctgtagtgatggctggttctcaggcttctgggtgatttcccccattcttgccccccatttcctatcactgtgaatacaaacattacatgtgaatacaaacattatatgtgaatacaaacactgggattacaaacattagtcctcccctcctgtgtttttacctgagttctaggggagtgcattctgggctgaaaggcttgcagggcagcctgcagaggcaccatgctggctctgtccgggggtgtgggggggtgtctctttatatcatcatgtttctctaaggggtcttagtctctgcttgctaaaatgtttttgttttttttgtttttttttaaacttcacaaatatattagatgttcacaatctgcagaattgcttctcaggataaccattttttgtttgttagtttgtttgttttctgaagtagttctcaatgattcttcatttggaatttgtgttctgtcttctatgtcatagcacttgctaaatttcttaactgttaaagttttaaaaacaagttaattttcttttagtcattcccttgaggtttgatagcagcttaccagcctgtgttgttatgaggcagtaccccatgagggctaggctagccccaggattcagatctagggaatatttcagctcctcatgtttgtgtggaaagtatcataccagccacacctcaagtcagattttgtcatgttggtcttcacttttcatgtttaatccttggctgtcaattcacttgtccctgatggccacactgacatctccactgtgtcagtggtggctttacatttccaggctggcactgccccttcctcctcagcagctcatgttgttttggtgaattgagcctttgatggctgcacagtgagcctctttgtctggtgtccctcctccccagtctctggtggctaggggtccgtagagtaacatccagctctggtgaggccttggccttcagttttgtcttattcaattttggtgggttgccactctccctggctgcctgcaccgtgcatcatttattttctggaaatactctgcagtggacacttgtttttcttacacagtatgagcttcgtcttttaatcagcgtgtttagtttgtcttcattgcttattcttcccatttgaatttctgtgttccaatttagtactttatatgtaccacttaaagatatcgtggcgacagtttcctcccattgttttgaatttattggagtttcccctcaggccctccactttctccctgcatagtttctgttgtgcagttaactatatcttgaccccactcctgctgtctaaggatttattagactggtttacacaatggtctgggaagtatagtggctgccttaactgaagagctgagggcctaatagctgtgcagcagcccacagagctgagtgtctcatcagcctctgcctggccctggaagcctaggggattcctggagagtcactctggaagccagaggaagctgggttctgataccagtgaagtagtgcagcagccacagggtagatgaacttgccagtgagtcacaaaggcaagctggcagagagccgagctctcttctgggacctccttttatctgggctactactgggagggcaggtgtttccacttcaagtcacctcaagaacgtcacccacaggtctgtcaacactttgtccttcagtccatttgagatcaagccatgctgccaaccaagattaaccatcacatacctcaaagcaaccctgctatcttagtgccattccccctaaatcccgatttaaggttctcagtggctctactgtataactcactagattgcacagtggtgaaccgagtatggggaaggatggttgtttctttaccctccttgtcagcctttgattctccttggcaggagggatgggtgtttaatgagtcaattgattcttccctccctacaggacccatgccttctgctggtgtgtccgtctggacttttcatggtatgtgatttcagactagttatctctagctctggggttttgcatgtaggcttgtggtcacagactctcagcattcaacttttgtggcttttcctatctacccagcatcaaggcaggcacacatatggtagtcatcctctgtgtgatggtaactcttgttggaagtttgatccctgtggatagggctattctacacagggcccctcatctgattgccttgctgctcaggcaccgaaatctctgttcttcccctgctagagtcctgctgtattcctgaccttgggagtttgtggctttgcagaggttctcttgggcccaggttcattccctaccaatggcaccagccatggatattattggctgattgcctcatgtagtaactcaccgttcccttgtgttatggttggtcttgggatctgtggacagtgaggcccctggaatttgagaggccaattccttgattgggttgagccgccagccctcacagagatgggtggaggtgcccttgagttgatgaccagtgacagactagatgcaccatggaaaggcctctcttctgaccctgcaggtaagctttctttatgcctgagtttgtttgtagttctagagagttccagatggaaacgggccagacagagataacagagaaaaccctgacagaactgtgctcttggctctggtcaggcctgtctctgctgccccaagcactcacgggcagctatggttggtcagaacggaagcttgtgtgggtcacaaaagcaccagagcagtgctggcaccgtcaccctcctacagaagtgcatccagcagtatgataacatgacctgtcttcctttcgggaacctctttccactagtgtggatgttcagggtatgtgccaggtagagatagaattcttcctttccctggtacctatgctcctgacctattaggattccctcagaatgggctgcagagagaagcctgggccctctaaagaggatttgaagctcaggatcttgaagagttccttaagtggaggcaagtgtcagggcacaagcccaggtggcagcgtgaccagagctggaagcagtggggccagaatgcttggggacctagggcaggggccacagactctcgcatctattcagctttcagagtggggtacagctagagcctctgatagaaatgagcctgtaaaagaggggttttaggcatctaccaggaactgattttgttgtggacgcccccatgcctccagctctcattcatctgagggtgaccagtgaatgactctgagagacatgatgggagagtgggcagggagcagggctgggatgcccagagctgggtggactccagctctttgtgggctgtaggctcatgacttagtttttcttaagaaagccgtgtggagtggctacgagttgagtggaggaacctagataaggagaaaggccatggggcttgcgaaagaaccacaggagatgcccacagagagcagccatgcatacagcagccatgcatagaggccctcagaggcagaactgtggtgagtgggcggcccagtgagtcagcattggcaggggaggctggaaggggatgaggagaggagaagnnnnnnnnnnnnnnnnnnnnnnnnnnnnnnnnnnnnnnnnnnnnnnnnnnnnnnnnnnnnnnnnnnnnnnnnnnnnnnnnnnnnnnnnnnnnnnnnnnnnnnnnnnnnnnnnnnnnnnnnnnnnnnnnnnnnnnnnnnnnnnnnnnnnnnnnnnnnnnnnnnnnnnnnnnnnnnnnnnnnagggtaaggagggggagggggaagagacatgcctgcaccacctgtaggctctactatcaggtgcttctgtggggtgggggactctgggtctagggagagacccctgtgccaacataaaatgcctccaacccagttccctttagtgagggaggggagtgacaagggttgcctcgagccctctgtcagcagcctttccaatagcctgagtgggctccagggcatcacatacacctgcttctcaggtcacttatatccatccaagcaggggtgtttgacacggagaaagcagctgtgagagaatagaggatggcagtgatgcccacacccacacagccagaatgattgccacttggagggtgtggcctgaggccagaacctcctgcaaagggctgtatttgaatttccaagatcatcaaagccattttgcctctacacagtacagtatagtctcttgaggctcagagaggctgattatattcttcaggttacagagcaaaccgatgtcctgccagtgtaggccttgtggtgtttttgacctgagacagcctgcaggctggtcctctaccccacattgacacctccttcccacagtgtgcagaggctggtcaagagttatttctggacaatgagaagtgggctttgtaggctcatgcgtttgaacatttggtcctgtttggtggcactgtttgtagatgttgtagaacctttaggaggtgaagcctttctgaggatatatcacagggtacaaactttgagagtgtagagctttgcccatttgcagtttgtgctcttcttggtgtttgcagttgaagatgcaattgttcaattttctgctgctgtgactgaccccctaccctcaccccctattatgcccctctggaaccttaagccaaaacaaatccattctttcattgatgcttttgtatgtggtgttccatcacagcaacagaaagaaactaaccgctttctggcaaggccctctgggaactatccacactgccctctggctgggatatagacaggtgagcttgcgtactctggttacctgtgaccgcctactgtctttttagtgctctgtccactggtctgttcttgcactctgccccaaggcccactgggctgtactgttatgacctccattggtttaagtggggctttctctatgcaaatatgggttagtgagcacactggtggatcaaagatgaatgacaggacttccacgaatacaatgatagttacataggactctcttggagcatgcagtttctgcccaggagtaagggatacccatgttggctgttgcttgttctgtgatggtcatctatttccccacccccactccactctggctgtctgagttcatcctaaatgttgtcatggggaaaggacattgtcaggagactcaggttccagaggcagtgatttggagttcctgggtcctgagacaatttattctacacttttgtgcctcagtttctcttctagaaaactactatgaacccctggcctcagaattttattttttactagttttttgtgcagcactttctctccccactgccccaagattaaaacattgacctgtagaggaaggggaggaggctcaggtaggacgtggggttgagtcttgggttgtgactaatgaaactcagaagacacatggctcacgaacccctttctggtgttatgtaagcaggaagcgttttctggagagaggagactcattggtggagctgcctgcaagctgggcagagagttctaaggatgtactctgtggggtcatctgtatgcttgggtgaggttttttggtnnnnnnnnnnnnnnnnnnnnnnnnnnnnnnnnnnnnnnnnnnnnnnnnnnnnnnnnnnnnnnnnnnnnnnnnnnnnnnnnnnnnnnnnnnnnnnnnnnnnnnnnnnnnnnnnnnnnnnnnnnnnnnnnnnnnnccacccccgcctgtataaatacacaggtgcctgtgtgtatatgtttgtgtaggggctcatgtaggtcaggtgagagcttaatccctcctgtgggtcccaggaataaaattgagatcctcagatttagcagcaaatgttaccatcgagctatcttggcagccctcaccttgctttcttttttagacagagcctgtcactgagacctgtagctcattaatgtgtctagtctggccagccctggggttgccacctcaccagtgttaatataacaagcaagttccatcacacttggctttttacatgagtgctgggcccacatagataacttaggtccttatccttgcacagcaaacacttacccactgagccattgctccagcctgtctacattacatcataccaacaggtattttactctgatgtcaccaccattgatgtctgatggccactggcctctctgcccaagcagctgaccatccctctaattgtctcaggtggtttcgaggtctccatcttcagttgatggctttctctgtgcgactgtctgcagcactctctcctcgccattaattatgtggtgagcaaatttgattgctttcaaacaggattgttctgtacccgaggagaagcattcagtggaaaataccattttgtttggtacttggcaagcaggtctttagggctctgtgggtgccacctaggcgcctgttggtgctgcagaatcgcctgtgcctgctcaagtggagctgaggcaggagtggcactgctcattaaagagccgttacccagttgcaccacacagcaccctcgctgtgatggccattccttgaaaagatacaaacagcaaacttctccagttctatttttcttctgtgccagcctggagacacagagaagcccagagaaaggcagcagtggggagatttaccgatcaataaaagagacaattacagtttgttgatgaaaggaaatcccccgcccggcctctcgtggcatcgacactctgctaatgataacttgggtaaccagctcgagacgataaaagtcaatgggatgatataggatttcaataaagttatggcacttcataaaccttcccgtggaaacagatcgcccccagaccggtgaccagttccagctggatttggtactttaatttctcacttattgaattttttggcactcactaattatgaattctatgccagggtggtaactgtgtccccagcttgggagggaagagatctccaatgaggctttggaggcccacaggctaagggggagaggtgggagggtgttctctgcaccccagcatcccaatccacttaaatagaggggtttaagaataagcagtattgccgggcggtggtggcgcatgcctttaatcccagcacttgggaggcagaggcaggtggatttctgagttcaaggccagcctggtctacaaagtgagtgccaggacggccagagctacaaagagaaaccctgtctcgaaaaaacaaacaaaaaaaggaataggcagtattggtgctgagggtggctaagtcttgagtcagggccttagcctcatgggaaagtccttggtggctatgggtgttgctcctggtgcccatgtagtctaaaaaaaccagtctatggaagtcattcttttccccactgagcctctcccagggtggacagaccatgcaggtcacatgggagggagtgtgttgtgctggccaccctgatcttttcctgagtgtgtgatttgggaagggatgtgctgcaacacataggagacacatcctggccattgtgccgggacagcatttgccaatggtaataaaaatcctaatgttttcatgagtaatggttgtcagcacgatagctcactggacactttgtccacagcaatattgatccacacagctgcccttgtgaccactttcttgctgagggaggctttgagacctggggtgactagatagctggcttcagagcagagctggagttggaactgtccctttcttcctgagctgtgctgtccccagcatcttcactgatggctacatgaatgggcaaagcttaagcagaaggcacccagctcatcagctcgtcagcacatgtacttcaggatccagttagaggccagagctgggcttgcccacacctgcgggatgaagagccgctcactttccccaaggcgaggctggttcctgacacgcctggacttccaaggaggatttgccaccctcacttgtgcactccatggaactctcagaaggtgacatcaggtcgaggggagtcgccagcctgtgcctgggattttggggctgggtctcctttccctaggagtaatatctatgtctaaaggagcctaatggccctgtaggtttttcttttgttttgtttttttgtttgtttgtttgttttttgacatacttaagaaacatgggcaaagagaatgcagtgagcacccctggggaagatagtctccctaacaatgctgtaccctatatgtggccctcacagcatcttggctccccacacagggcaggttgcatgtctacagggccccttgctggcagggtggaaggcgttcctcttcagctcctgtgacccctctctaacatcttagagaacttggtcccagtctctgcagcatctctccactgctagctttctggttcaggctgtcaaccttaggatctctagtgtgcacagactagctgaggagcgttagccacaactccagctgtcactcatactctgtgtggaatatggctggataggctggtggcctcctacgtctgtgattcgctgtggatgtgaggtgctcgctgaagccacagctgtttctggagcctcagtgtccaggcattaggacagggtcaaggattctgagtctgctcaggaagggttgggccttagcccccagctttgtgttcttgctctgggtggcactcgtcagaactcacaccaagttggtgtcttccctggcatggttgaagtgagtactgttggcagggctcactcacccagtaaaactgagtctggagctctgcaggcctagacctctggtgcaggctctctggaggtatgcacctctggcagatggaagcatgccagagtcctgagctttttgagcatgtgcagggactctaaagctcacatctctgatgcttccaagccacctcacacactgtccccaccctgacctgaccatcttgtctataggagagagatggcatgcgtgccatcctgggatcctacgacagtgagctgacccaaactgagtactcaacccagctgacacagcgcctgtgggaggccgaggacatggttcagaaggtacatgcccacagctcggagatggaggtaggtgtgtgccatgggcaagtggaggctatggtgtgtgtgggaggagggcagccaagggggttattttggtatgtgctctactttacttcttatatagcacttggtggttagagggttccaggcaaccccagccagcagaggtgggtgtcaaggcacttcaaggcaaggcaaggcttctgccaggttgttgccaggtgccttgaagacagtctgtgctgtgtaaccatgtggtccctgcggcagcctgcttcctcttgctgcaggttcctgtggtgttcctgtctagaggatggcacagtgttttccaagcagtttgtggcttcttgttctctctgtcatctgcagtattgtgagccccctgtgaagtctcatgtagctttgtggagtgaaggtagagaaaatgttccactttaaagaagagagtaactctcagtgtggactgcacttggtctctccttcccggctggcttgtaccagggcagagctcctgcatgctaaatgctgctctccctccagcagagatagaggtttgcttaattctctggagaggctgcgtgaccgtacaagatgaggtgagagcctgcctgtcaggagaaccacacagccacatccccagatgccgcctgcgctgctctttacccactttccagttgtatctctcagcttgactctggctgtgaccttagaagcaggattgtcgatccnnnnnnnnnnnnnnnnnnnngagctaaagggatctgcaaccctataggtggaacaacattatgaactaaccagtaccctggagctcttgactctagctgcatatgtatcaaaagatggtctagtcggccatcactggaaagagaggcccattggacatgcaaactttatatgccccagtacaggggaacgccagggccaaaaagggggagtgggtgggtaggggagtgggggtgggtgggtgtgggggacttttggtatagcattggaaatgtaaatgagctaaatacctaataaaaaatggaaaaaaaaaaaagaactggcacacacaagactcagaattcactctttgtcagtcaacgataataaatatataaacataaaatcagaaaactataaggccttatggttgataaaataactaatattattgctgttaaaaaaaaagaaaaaaaaaagaagcaggattgtcattgtccgcatttcagtgacaagaaaactgaaacccgaagacccaggactgaacctaagcctccaggcacctatgtacaaacataggactgccctgtagcatggccaacctgcagagcatcctaggcaaggcctttgtcacactctgtgccatcagcttttttggttttgattgtcacatctatttggcttgtccttgaccttggtgtgatgcagactgccagagaggtgctgcgagggccagtcattctgtgcagacaactcgaccctcacccagctagtgctcttggttgtccacttggagaagtgtctaaaggaacagccagggtgacagcatggctatatgttctttccagagagcactggagtccacactgagcagggccctttcctaggctagcaacagagcctttggtgagggggatgtttagtagacagctgtgagctagcctggtggcacaggcctgtagtccaccagggaatggggaggctgaggcatgaagatgcaaagttcagtacaccctgggctatagagtgagtttaaggctagtctgagcaacttaatgtctgtcctaagtaaaaagaaggtggaggatacagcttaactaggggcaggggtgtgactcagtggtagatcacctgcctagagtcccccagtgaggggctggaagtgtggctcagtggtagagcacttactaacttttatgagttcttatattaaattcttagttattgaaaaacaaacaaacaaacaaacaaacaagtaaatatataaatcaaacccatgataactacaaagtgcagtagcattttaggtgtgggatcccatgaggaagcaatcagaaatgcatgacactgctgtaacctatctgggaaagtcaggaagcacctttggattcacagctcagaggacagctataggtctcactggggcaagactggggcatgactagagtgggagctgctgagcttcagctctggcgatggcttgtggcaaggctgtgccatatgaagaggccacaatccaggctggctgcttgttctttctgcccatgagattctcaccaggcacattgggcctatgctgtccctgcacggaggagaatccctcactgacactcttggcagaataaagcaagtcacacgagttgtggaacctgcctgggtcctgcgcttatctccccactccactctctggctgcacacttgttccaatgtctcacaggtggccagtagccaggagtgcaatccactggggctgctgtgagctgccacaacccagctctccagcctcatctgaaaggttaactggggttctagtgagctgtgccatcatcaatgtaagtgtgttaatagttgttttattacagcacatttagctccatgagaaacgccaacgaggagagatttgtgggtctgctctctgacaccttgcagctccctggtattttctcactgagagatctcatctgtgctgccatatgcattccacataggtccttaggaagatgatcgtcagggcacagccaatgttttgtgtcaagtgaccagtgttgtcaggattcagctccagcagatatatgctccctgtcagcatctcgctgtcaccctgctcatgggtatatgtcaagcaccctacctttccctgcaggatgtaaggttggcaggttcttcctcctgttttgtgtcccagggttatgggaaagccagttggaggctcagctgggtggagcaaggtgctcttgctatttcatagtcatcgtcactgtgagtgttcatcagtttagtccagatgagggagggtgaggagccccccctccccaacatacacaccttggagattcctgttacagttggtcctcctatgcatgggcactctggcctcttgaagcaggctggccctcagtgaccttcctcctttgggcctaggtgtgctggtatcatggctgtggtgagttaggctcctgtgagcagagccctagtggcttttctcctcagcctgtggctctgctatttatgctgggtatgcaacctttgctgtctagagtggccatgtattcagacacttgccgcattttcacaggagtcactgagagacagttgtgcccagtcaatcacagaattccctgtccccactagagtcctcctcatactgtagggcccttgaggagcacaaggtctggcagatccagccctttgaggatggaatagtagctggatttagcagtctagaggaggaagccaaccagggggtcctaattcactggagtggggaaccatacaccttctgcctccaccaggtggcagcagacaggctcactgctttctgggcctcaccactggcctggtgggggttaggtcagatgcaggaaaggatggcctggaggagggaataatggggacctgggcacatattgatcagaggcaaggagcaggcaggtgtgagagtcccacagctgagtggtctgttgtggagggagtttggaaggaccttagctttggccaaggctggccttggctttcgacttcccagctatcttggagcttggatttaggaggttactccctccctcagcacgactcctttccattctgttacctgctctgtagagtccagtgtacagctgggtttcctgtgagtctccatttagtgagaagggagatgggcaaacagtcttactttgtcgtagaaggcaagctatacataggccaaaggaagaagaagttgcctctggacaggcagatgtgggctcctggggccttggtgagtcaggaggggtatgtcctgagtcagttctggggatttaaggtgacttatgaggatgactggtaggaaagatccctgccacagtgagccaggaagctgttcctacagaagccatacagcttgctgtttaaagcccagaccctggtcatcaccagcccctgaatgttgtacaaccactttaagcttatctccagctagcttatgaataaatgagactcggactatggttattttatttggctttgacagttactgggggtcaccctaatttactcttctaactgctggcctggctacctctctagtgggataccccagatacttgctgtttctcctgactacgccatggccccatctcctcttatggtggcttcctcttctcctcttattcttcttccttttcctcctggcctcttctcacacctctctcttctccacccccaacaagggaactccaaacctacctactagaagttcctccagtaattgtccatagccaatcttatttaaccaattgttttaaatcaaggaacaaggtttgcacagcaaaagcttgtaaacatgagaatatcctcgtaggcctagacctttgggtacagagtttctcattacagtacaaaacaacagaccaaacgccgggcatggtggcacacgcctttaatcccagcactcgtgaggtagaggcaggcggatttctgagttcgaggccagcctggtctacaaagtgagttccaggacagccagggatatatagagaaaccctgtctcgaaaaaccaaataaataaacaaacaaacaaacaaacaacagaccaaactccaacaactgtgtacttcacatgaagacctatggccttgctgtcatctccagcccctacccttttgaggagagcactactgggccaagacagccacagcttggttctatctcattctgaggtccagcaggtacactctacccatctaaggctactctgttagtcaagatggcacgcatcacctgccacttctgagtgcccggcttgtagacacatcctgcagccagcacagccttagtgagaatctctccaggttcctgggcacagggctaagtggtgagtggtcccaggcaaaccttcccatctcttgtttttttcactcatgagcatgttgccatccccggtaggtacattctagagacctcactcattgcccaggggtctgagaaatacacccatagagggcttagcacctcctgggtactgaatgcccagagagtggctgagagaaggttgggcctttgtcttgccacaggtgtgttcctaggccaaggggccagccactggtcctgctgtaggtggcggagctacagctacagatggtagctttccattgccttcctggatagtgaagttcatataccagatgcttgcaaatggctcatacctagagagctttaaaagtcttgtcgggagtttattagctgagctgcttgtattgacacagtaaaaagttacataacttcgtggaactcctttcttaaaggtcccttagtgccttacagctgggtaagcatcgctcaggcctgggaggcaagtggttcttccagggaagttacatagcaagaaatggagagggagcccccacattgcctgtgttgttcagatctgagttgagaaggtgaagaggtgtgagccagtgtagggtctgactgcaaatccccgcttaggaaacaggccaagaaggagggttcctaggaaagaggaagaacactgctggacatgtgctgattcaaggtttctcctgggtgtgtggcaccatctctctgctttctttgtctctccaccccttaacctttttcctttctacttctgcccctagtcttcccttctctttgcctgtcctctctttctgtgtgttgtcatgtgcatgcataggtatacatgccagtactcatacatttggcggtcaagtggacattggggctttcttctcaccataacccggagcttagatttggctagattggctggccagtgagctcatggggttcttctcgccccacctccccacactgtgatttaagatgtgcattgccaaacttggccttctccatgggcactggggctgggaactcaggtcttcattcctgtgcagcaggcgctttaccctctggtctctttttctttctgatggcttttctcagttgcctttctttacccaccctcaccccaagctcctgttttctctggggtcaacaggcacttccatggattcctgtgcactgggtgtagctttcccatggttgaccaaggagggaatgctcgttgtgtgggaaggcaggtgtgccagcctcagggctgccttgggcaggcaggcaggcagccactgccgtcctcctctcggcacagccctggcccaggctaacatccgtcatcagttccagcatggggcatgctttgattccagcaaaatcattttcagcaaaacaaactagaaatggagagctggagactcccagtagcctatctccagtggggctgctgccattttgcccggattttatttattccatttaataaagcggctgcggaggttggaagcagatgtcacgagtcctctgtcgatagagccataaatacaagtgtgtggcacttggatgccacgagtcacctgagttgtgtttccagcatatttaattaaaacagattacagcacgaccagctacatgaagacttcttcccaaacacgctggcgtgctgctctccagtgagaagactacactgtgggagagacacaggacagaagctccagagagttgagagaggtagatgcaggaggatgcagggagcgattggaggatgcatatgccaggtaattgctctgcactgcactatagttccagctcactgggcccattacatagatggaagacaagtaccctaagaggtgaggtcagaggttaagatcagcctttgtggaggtcacctaggtgataggcagccattgggatcctggccgcatgccggaaggttgattacccacagccgcagttcccagatctgagctctgtcagcatccctgcgggattagtggggacacttataggccaggatcctctgccactggctatgggctagagctgggaacctcctgtttctagttaagtggtctctgtggagtcactaaccctgaagagtgtgatggagcaggctggggtcatttgtcttctctactccagcagagcccactcctgcctatgatgctttccacccccatagcccatacctcagtttgcagctttgaatggctaagcatgctggctgcctgctcaggggctggcttgttctatagcccccagaagctcttgcatccatgtctatactcacaccccaagggaaagcctagcacttaagacccagcctcttcagttaatgtgaccttgggtggacccctgtctgcttgggtccaagtgaggccgatggcctactctctgggttttcccagccaaggccatactgtgccatggtattgcaaaacgtacaccaagcccctgcttgggatggtctgtcccagcctgtctctacctgcaggttttcctgcttactccgagctgtctgtgtgcctgcaggggtgctagatcatcaggctgccacttctcacttcaggataaaaatagccctgcagaggcttctgtgctggatgtaatgtcacaggtggcacacgtccagggcttctgtctgaacacacacatctccaggggttggctggagtagcaaatgtgcactagcccacctgccaccttggccacacctgagaccaaggacatctgtgctgtcctcatgctgttgtctgccttgccagagcctgagcggggactgcttttggtaccatttctggagcaggctgccagcctgtcgtccctgtgcgtagcctcaaagccaggctctgtgtcctttgtggtagtagtatcttgggcagggcagatagctggtgccatgtgaacagagggatgagaggtgactgcctgtgttagctgatggctgtgggcagatgagggacagctggtggactgaggtgccatgctgctgttttcctgcataaaggctgctggtccctctttagaagtcttgggagaaagcaggagcatatgggccctgatgtcaccgcaaagggcaggacacttactgtcatgccatgagataattcctcagtctaggttccagtaatgtggacccctgcactgcccatctcccactgctgggcattatacctcatcctccgccttcagctctgtattgtatctcccagtgaggcctggtccatcacctccactgtctaacttttgtggctgaggcagcattttctggaggctctgtgctcaagctgcagatagtcccttctgagaacagtatgatgatcatggccaaccatctcttttacaccaggacctcagaggggccctgctttctagatgaggatgtggtgactgagatgtcttgttctcccaacatctttctacaacagtactattgctaaccatgcttggctgatccaagagatgagacccttctggagtgagtgtttcccagtggtcttccggggactctcctgctgnnnnnnnnnnnnnnnnnnnnccccttttatctatagatgtggtggtcatacagcgcaggttgtcacttaccacccttctttctttctttctttctttctttctttctttctttctttatttatttatttatttatttattatatgtaagtacactgtagctgtcttcagacacaccagaagagggcatcagatttcgttatggatggttgtgagccaccatgtggttgctgggatttgaactcaggacctttggaagagcagtcggcgctcttaacctctgagccatctcaccagcccacttaccacccttcttatttatttaaatttaaaaaaaaatttattttatgcacataagtacactatagctgtattcagacataccagaagagggcatcagatcccattacagatggttgtgagccaccatgtggttgctgggaattgaactcaggacctctggaagagcagtcagtgctctgagccatctctccagcccacttaccatccttctatggccaaggctacagccaaaggcgctgaagtaagagtgtgtgtctgtgtgtgtgtgtgtccctgtgtctgcatgtgctcaaatgtgcatgtgtgcatgcgtgctgatgtcagtggacagccgaaggtgtcaatctttgccttctacttttctgaggcaggggcttgcattcctgtgtaaacccagctagctgtccagagagctttcagagagtctactgtctctgccttctttctcaacacaggagcatgggatttacagatgtgtgctaccatgcgtgtctagcttttacatggacttttgggatttaagctcagattctcggtcacaggaaaagtgctttctctgctgagccatcttctcagcccagaagtgcctttctcagtcctttgagcacatatctggggttgatatgcagacattaaatcctaaggtgaagccaggtctgaactccttcagtcactgccactgtcaccgtcactgagacttgcttaattcccatcctttcccttcagtgccccagcacttcctgggctctgccagccctgtctttgcagagtggtttcgctgttggtcctgatttgcatttggctaattgctaaccatgttaattacctttctgtgtgtttgccgcctgtgtgcgtttcctttttgggagatgtctgtttgcctcttcgcccgctcctctgtcacactgtttatctttttcctcactgctttgtagcagatccatgtgtgtccttgaagccagtcaggtggaggggatatcagtctctgacctccgtcccctcctctaaagcaatgagagtggtgtgtttgggagatattgtgcgccctggtaatgtatgtgtgggccttacagttcttccagttttgagagtctcaggttggacctgggttcaaatcctgccaagcttgctgaccagccactcactgaattatacatggtgtttgacttcaggacccattttcctaagaaaagctcttctagaggaggacatggtatgccaggagaatatccgtaggcactgagaacctctgatgtctgcagggcacttcagcctgtggtagtccccagaggaagaggggatcacagtccccagatcacagtagatggagaggaagaaggagtccgtttcctgttgcagagccgacagtggagcgactgttgctctggtctgggcagtacccttcctgctcagtgagggtgatacatccttgctgtgtaggtgcttagtgcacagtggaatgcatttatagatggctcacagcagcctaccggtggtcaggatggatttctacaagcatcttggccatgctgcttactgtctgccagggagttgtctagcagggcctgtgagaaccacagtgtattcggtaagtgaggagtgtgtgccattctagagggggccatgctgtgagcacaagagaacagggtctgtggcatcctggagccaaggtctatgctctttgacctttgatcttctgtactgaaactgagtctgtgcctgcagcctccagtagcctgctttttcatggggatgctgaagcagaggttgggaagcctcaggaaggccatccttctctgggtgttgagccctggtgtggggctctgggtactcttggtcagttgacccttttgttaacctttctcagctgaggatagcaggccaggttttccctgctcctccacagtttgtccaatgctggagagccctagtgttctgggcctgtcctatgtcagcaggaccacctcagttggtgattccagagtgggaaactaggatgcaagattcagctggctgacttcctcctcgccctaacttgccccagtgttggaccacacagcagggatagtatgatcagaattttatttaacctagggcctactagggtggcctgacagacccagggggagtggaggccctgtaccccaaggctgacaggcatctcctctcaactctaaccttcttggtcttgtcttgtaggctcagctgtctcaggccctggaggagcttggggttcagaagcagagagctgacacggtgagtactgaggtgggggtcacttggtgctgtgtggtgaagggcagcctgagggcagaccaccttgagtcctggatccagacaaagggaagtcctgccttcctccagtaggacttggccttcaggcatacgctcctgtgtggccatggtgtttccccgatattattagagtggaggggtctgaggtggaaactgagtcctggtgcccacccctttgtgataccaaggtgtgagcccagtgggagtcttgggagccatttgggagcctatggctaagggcttgggtcaggccaggtcagcctaaacaacataggtgtgtgagcacttagggtacaggtcagataacacaggtagggtttccctctgggactcggagaatgcggattagaattcacaagtgggattggcttgcagcgaatgtgagggttctgggtcagggctgagattctgatctagaggtgggagagaacttcatggaatatagaatcatggaaggttgtgcatgctggggttgtccattgcccattaccaagtgtgttgtcattagcatgggagtcagactgtgcccaagcagaggctaagcaacaaggtgtcagtcagctggtaactgacagttaaggcagcgtggaggagggaaaggtgcctggggctgtggtcagaggaggcaggccaggcaggcctgtggcctagaatgtggggagcacggagggaatgattttgtagattgtgggatgttaacgtcccacagtgaatgtggaagagtctgtggactgtggagcatggtgtctgtcagtgggcattgtgagtttctttaactttgccacgttgtcaggtatggtatgacctggttttacccaggcagtgttggttgtgggctggctagagtggtagccctcttctctccacacatggcctcttgggctttgtccctgtgattccaagtgtttcagcttcctttagcagtggcctgtctgccgctgccattggggaagccacgtgcagggagtggggggttttgtgagctgagtgtcagtctgtacagcttggggagaccctgatgctctgcgcgttgacatgcatggcttcctcagtgtcgacctgaattggatgtaccccagggccttgttttcataatgtatacaaggccaagtagaattagaaatgagttgtactaagcacatgccaggcctagggctctgtggctaagcaacttgccgtcacccagggtgcactttgcacaggagcatggctgcctggctctgctcatgcttcccatggcactgtggaggaactgtgagccttgtgtttgttttaggggtaggtacagaagctgttctcgggcccttagtgctaggtagctcctaagcttagtgaggcatagggctcacagcttccacagcttggtgtgggaatatagggtgcaccaagtggcggagtgcagaagcctaagctggttctctcatcttgtgtccctggaaagcagtagtggctggacccccacagagactgacttagaattccagggccttggcagggtgggattcaacctgtgttgctttggtctcaatgagcttagccttctacccctgcctcagttttgtttttaatatttgtttgtatgtgcattgtatgtgtgtgggagagaaagagggaggattgtggcgtgtagaagtcagagggcgtaagtcctttccttacaccttgtttgagacagtgtctcattgccactgtatgcccagctagctatcctatgaggttgtctccacccctcactctctgtaaaaaggctaggattatagacacttgctactacctcctgctttattgggttctggggatcaaactcaggtcctctggcttgtagttcaagtgcttttctccctgctctatcttgctagctccagtgctagctctgcctgcttgcagaggctctggttttaggggacttgggagccatccttgtgcttggtagttttctatccatcagcctgacacaagctagagttattagagaggagagagccttagcattcccagcccattttgagtggggccatccctggcctggtggtcctgagttctataagaaagcaagccatggggagcaagccagtaagcagcaccctccatggcctctgcatcagctcctgcctccaggttcctgccctgcttgaggccctgcttttgagaggaactctcatggaaccatgagtgcaataaaaccttttctcctagaggctatgttgtttcatcacagcggtagtaacccaaacaaggtaatggccaatgcaggactctagtttgcttttgacccttgagagcagagcagatgccacaggctctaagatacccaatctctgatgctgctgaataggatgcaggcccttggggcagcgttccttcatgtttgtttagggttccatttggaactgtctcctctgcccagtttctgatctctgcctttgattgcctaatctcaggtcacttcacagtgtttatttctctttcttctccttcccacttaagaggaaaataagaagtggcagtgcttgggtacctatgacacagctggtgtttgtctcccagcctccatccttcccactggtgctggaggcttcagggccatctttgccagcagagtaagccctaccccggcctcaggcaaggccttgaggaggagcagcaatggggcctggcagatgcatgttcatgtccgactatcactgacctttgaagcttggctgccccagatgcctcacctgcctcctggtcacactgggcttggtgaggggaggtttcttcagagcagccgacctgagtatcaggaccaacattctgtggaacagtgtattaaatgagttacatgcctagccttaccacatgtcaggagtcctgttgagtttgggggggttattttaagaagctgtgtgtaacagtggctcccatgtggtcacctgagtcattggctggcagaaactatcctctctgaaaaccctttccaccctctttgccctcacagctgcatctgctgctgacactacatttctctcctccgttttattactacttactttgtgtttctttgtgtctgtaagtacgtatttgagtgcatgtgagcctgtgtgagtgtacacatgtgtgcctgcatgtgagatcaggccctccccctactgtctgagacaggttctctcattgcctggagtgttggcacctaggctaggctaccttgtacatgagcctccagggatctgactctctccacctcccatctccccactgctgggattctgaacatgcgccaccacacctggctctcagagtgccggaatcaaggtcttccttgctgtaaatcgagtgtttcattgattgaaccttcatctcagccctggctctggcattttgactaagggtcaagtctgtagcccaggctgctggcctcaaactcatgattcccctagctcagcctcccaggcgctcagattagagacatacccaccacaactgcctccttttctaggcttaaacttgcatctccagcctcctcctgtgttgtaagtcccggaccctctgcaggacctgagatgcagctgatgttgccattcagtgtcccgaggaggcctgtagaaggaaggtttccagtagggtttcccaggggtttgctgaggccagcggagcctctttgttgtcctgctttaccttcagcctgtggtagccccctcccctctgatcagctgtgcatgggcacagggtccaccctccacgtgaccctccccgccgcccccttactgaggttccaagtgaattgcttgtgaaatgcccttgctctttttctaatggagaagaaccagggagcaagtacaccctggacctggcagtgaggctgcttccaagtcctctctctgccttcctgaggctgtatgctgtaaagaaagggccagctgaaccagctggccctgagaaggaggctcatgttacctgcatgtagagcaatcacacaagtgtccagcattaacagggacatggcccgagtacttgcctgatccctgcagcatctagccttctgcccgctggaatctgactccaagcttgttcacgagtagtagaaggggagctgtgccatattgagctaatcgctaatggcaggacaaaggcagtttgactttgtgttattaattagtaacctcacactaattagtgagcatgagtgtggttgtgcttcctctttaaatgcaattaataccacaaggaacaacgtcccgggccaggcttacgtcgttagcatacctcaccctaattagatccggccagcagtggctagagaaatgaggtttttgattacaaccataaaaggcctccaatattttatagacttcagggagctagaaatgtggatttattttcagtcttaacaggcatgctgctccccccccccccccaatccagtgtaattaagcagtcatttctcttgattaccattttcccctaatggctcctccttaccctctgtgccgtattcccagtggagcttgtggatcaggagaggggttctgcccccaaagaggctgtggttgggtcagactggagcttgcactcaccactcttctacgctccatctctgagagcaactgcaaatagtgcctctctctgtagccggaccgaaaggagcacatcacaggcatatgctcggtgtgatgaattggtaacaggggctggtacgtagtagagctgtcgcctaagcaggcacaaggccttgggttctgtccccagcactgcatggcatgcattggcacatgcgcagaatctgggcattatggaggtgaaagggggaagattagaagttcagtgtcatcctcagcttcatcataagctcaggcccagcgtgtgtgagtgagtgtgtgtgtgcgcacacatatgctggagaggttgcttagtggttaagagcccctgttgcttttacagaggacctggggttcagttcccagcatctgcaagtcagctcacagtcatctataacacaagttccaagggatccgatactgtcttctattttccacagacactggggacatgtggcacacatgcatccatgtaagcaaaatacacataaaaataactaaatcgggggctgcagagatggctcagtggttaagagcactgactgctcttccaaaggtcctgagttcaattcccagcaaccacatggtgactcacaaccatccgtaatgagatctgacgccctcttctggagtgtctgaaggcagctacagtgtacttacatataataaataaataaatctttttaaaaaaaaactaaatctttttgtctgctttctttgagacaaggtctctctatgtatccctggctgcctgctgtcctactcactctgtagatccatctgcctcaggctcctgagtgctggaattaaaggcacatgcacccacccccaatttaaagagcatgtggaatcctctggaacaggagttaacaggtagttgtgagcctgggtgctgggaactaaaccctggtcctctgcaagagtagccatccctctgcctcttagccatccctaaatttaaataaaagaaaagtcccagcagtacaggtcctgtggttgcatatggagaaagacatggattctgaggactgtgtacagtgtgtggtccccagcatgtgtgcatggtctcttagagctttggctgctcattggagttgttctgagtcacgtggatgtcacagaagtgagtactagggaccatagtcttgtgtgctcttcgcacatgtctggtcccctcacagtacatgacctgctattgggtgactcctcttgggtcctccacagtactggtggaggggcttctgcctatctcccaatctgagtatgttcttctgttcctaggcgtggcatgcagactgcgtatgtaccacagtgtgcaagcatatccttgaacacttgtttccctgtgctgagggaataggaaggctccctggcagtacatttgggctgatcttggtgcaaatacaaaagcaagcagcaccaggcatcttaagcagtagatgctgtagatctcagaggccaagagcccagtggccaattaggtgtctggggaagctgtttcctggtttccaatccagcattgcagactggtggcctgagagagctctccgagggaactggccccattgaggctctagttggtccttcctcatactgccaccctgagggaatatttcatcacatggacttggagaacaccttctgctttacatggtcaactcagtgttcacaaccccgctttctatctgaatgtcttcccctagtccctctgtacctgcatgagggttcacctgcacatgcccaccagaaggaacagaagccccactaaagtatgttggcactccccactgtccagtcggcagaagctattcacattgcttctagacctccactccacctctcttctttgcatctaagatgctggaccctcaagcctgacctctggggcttctaaagtgaagctccacagactcagtatatgccctgccacttgcctcccagtgattgaccatccaacccgtcccttgtgggttcagccagcctgctctgcagcagcctactccctgagctgcctacctatagagtctccagaatgctcttccctgtatttggagggatgagctggctgccttgcatagaaactaaaagctggcctctctggatgtgtcccatgtaggagacccattgcattcagcagcaagttgcctggtagctagcactggttatgtagcctcatgtaccccatgtctctctccaggctgaaatgaaagtgcagggagagttcagcttaagacacctctctccctttaccaagaagtagcatctcaggtacttccccaggttccagtgggcttagagctaagctgaatagtggcctccattcagacttcctattgctgtctcagagttacctcttagagacatgagacatctgcctggagtgggctttggagagatggtgacagcctgagagccctccagagccctgggcctggtaccatcctaccatctgtgtacttggcccagttggagactggtatgtatcaagcattgaatgatgagactactcaggcataggtatatggatgagcatgctcacactggtgcccagcaacagctttattaattggaaccgctggcaggaagggcaaggtgccgaaccactcaaaccacagtgcaccgttcccaatgggaggttgtgtcttgctgagaaggcagccacagcatccttagaatggaatcacaatgatgctttagggcaaagaggaaagctggtggagtctatagataagagacacaggaggaggagctcagggctgggctgcacagggccagtgagtacctgtgggcagttttcttggaagggcatccctggttctgcttcagattagatttgtgctttcttgagctgtcagagagctctggtcttgaagtgttggggctcctcttgctggggggggggtgtcagccaccctcctttttcctgctatctctagcagacagtctcctgcagttctgagggatattcatctcaatcacacgtgagaggtcacctctctaaacacgatcaaaatctgctgctgtgagagccactccattgagttgcctctagccagactagtcagaaagatgaagcccaaataccagggatgacagaagcggctgttatttcttctctgccttttcttcttaattggcaagcatactacaagtggagctgcatccccagacccctcacccaactttaagctgtgtcttctgctgtatgagttcttcatgtattctgcatactcaactactatcagagctctgcctcagcaaagctatagctcacccagcagactgttcccactcctgtattcttagcattcagagctgtgctgtgacaaggcccttggcatctccttttgttgctgcactctgttggcacagcttagacactgttgcctgatccaaagctaggaaggttcagtcctgggttctcacccatatgtcttttatttcatcttcctttgcctgtatcttccttccgtctcatgttttgattctgatccactttgagttggtttttattgtggcatgagttagggctcaaaccctgttcctgtgtgcgcatatccacttgtctcaatcctgcccccttctgagactcctcttctacctggtagtcatggccacctcattgaaaaccagctggctgtgccagtttgtgttcagtgctgaactcagttccagttccgcctgtgggtccttccttatgccaccacctaagttcttgtctttcttatcctttgctcttaggttgatatgagcattctgcctgtgtgtccccaccctcataatgcattgtttagatcttggttgtcatcatcacaggatgtggactcacctaggagacatacctctgtgtacatctgagcgggtttctagattgggttagctcaggtaggaagaccatccaagtgtgcacagcacactccctaggctgaggtcttggactgaatgaagaggaggaagtgagctgagcccagcacccacccctttgtgttatgcctgtggctgcagtgtgagcaacctcctcacactcctgtgtgttcctaccaccacccagcacccccacccctgcctgccatgccttctccaccgtggtgggtgggctgcaccctcagactgtgagctggggtaaacccttccttcggctgctttctgtcaggtgttttgttgcagcatggagaaaaacaaccactgcaccccatcaagatcatcttgactattcagagcaccttgcaattccatgggaattttagcataagcatggggggtggggtggggggaaaaccagttttgcaagaaagccctttgaagttgttgggttttgctgtgctgaggaatccaacccagttctgagcgtgcactctcctgagccacacctccagccagtgttcacagttttcatagagctgcatctattctgttgaccactttggaggtttgacccagccaccagggacccaagcatcatctgcaccaaggcttcctataccaggctggctcaagcttagactccaagaattccacagacgcagcattcaccccacttcttgcggcttcctactgtttcgtgtccacaccttccaggcctgacctggcccaagcagagacgccagagtctttgcttcaacccagctgttagagcagggaggctgctggtgtcccttctccactctgagtcagagattgcaggaactgtcctcagcatgtgttacctctggagaatggcctggcggtgggcgtgtcagcttctgcagagcggaagtcatttgcatttactctccttcagcctctgcccacctgtgtcaatcagagcagaccctgacagaaagaagttagggccctgggacaaaggaggagtgcagtgtgtgtccttgtctgtgtgatcagggcacagcaacatgaagtgtattaatgcttagaaagcaaaggctggtgctaggctctgccctgcattttctgtaagtgccttttgtacttttgagacatggtctcatgagcccaggttagccttaaactcatgatgtagctgatgcttgttctttcatctaccactctagggctggggttaccccatgtaccactaggccccgcgtacacctgcctttttagtggctactacttgagcagacggcataggagtgtggggcggggagaggaggtgaaaggggtctccctcccagtgtagcagcaggaccagcatttaggagtttggtctgatagatttgttggtcactgacacacggtgtagtttctttctgtggcagcctgtgatggggctgttaggatggaagaagacaggtccagaaaatctctgtcatttgcctaggtcagcggcagtctgggactttcacattccctgccctgatttagagtgtatcctggctcatccatccccaccttagggacaggaatgtccatgctatccctccagccaggcctggggcaccctccctgctctgtgatcctgcaatctagttggtatacattatggtgaacagcattggaatgggagcctggaagtggagggcctcaacttttacctacagtttaaataaccaggtaaatacttgctcctgaggaccacaaagtcttggtgggcagtgggcagcaggcagcatccccatctttacctccagtacatatgagcatagcctcctgctgagagatacatgctgtcctctccacaacctggcttcaggtcacacctgggtgtagagagtgtcagggcacagtcagcactagctgacctgccagaaagtgccaaaggggagaatattcacatgcctgccagtcttggagagtggagtgggcagaatcagcttctctaggacattcagtttgaaaaaaacaggaggcggggcagcagcaggtggtgaagcaacccccacccagcctgcacagggctcctcttcacctcatcccccctcacttggcaggcatgtgcttggggccccactgctcagctgcagatgagccctccaaaaagcactttgtgtgtaaaatccttttagcaggatgagtttggaatctggcccatggtttgaggcatttggcagggtccctgaagacgcaatccaattagtcccatgttttcttgtttttataactgactctagacccaggttttcttcagtgaagtagaaaatagataggtacaggctacaacattcacgcacaaccaaatttctatttccttcatctcatgtctaccaatccaaaacatgagtcagctcctattggctgtaagggagcagatgctcacaaaagagagggcaggacttacctcatgaggctacgggtcctggagcctgaaaccaggcgatgtggttatattggatacatgtggtagagataggaaatgagtgtatgggtgtatacaggtttacagtggttgtcattactggggaggtcttgagaaagggatggtgttggtagtagagcccccgcctagaatcccccagtgaggggctggggcatggctcagtggtagagcaccttcctagaatcccccagtgaggggctggggcgtggctcagtggtagagcccctgcctcgaatcccccagggaggggctggggcgtggctcagtggtagagcaccttcctagaatcccccagtgagggtctggggcgtggctcagtggtagagcccctgcctagaatcccccagtgaggggctgggggtgtggctcagtggtagagcccctgcctagaatcccccagggaggtgttgggggtgtggctcagtggtagagcattaggttccatcccaacactgcaaatagtaaaaacaaaggctgcttgctataccaatcctacaggaagagtcatccgtgtgcttgaagagctaggtttgaaatgtctctggatcagaaacccactgtgagtttgtggtgccaaccatagtcttatgctgtgggtcaagggagaagaggcaaaagtgggaagcagtgctgaagtggggctggtgggccagccaccagctagtgtctaggaagcatggctgttgcaggctcaacaggggaggagaatgttcctgggagaggcgggaggttgagcataaacctgaggctgcagactcagaggatccatgtttgtctgaatgctgtggtgtgagctagcacctcccactcctcccctgaagactatacagatgatacaggatcaaaacaaaatggcaaacttgttttggcaaaatagaagtggagcagaaccaagccacaagcagaaggcacatgtcccctggtggaggatcaagtgttagtttaaactgcataaaagtgtttgtcaggctcaggaaaagaccctgggaaggggaggatcaggtgacctgcttactagtgaggcacttcctgacaggcagtcctaaccctctgcagggcctcacctcagtaaagcaagaatcatgtgctgtcctggttctcaagactacaataggccctggggtccctgttcgttcaggctagaagcagatcatgctcactgtgagcacagctcttccctctcaatggaggaaccagtgcctgtgagattgcatcctagcaaggtttgttctctaggagcctcctgtagcaaggagtagagtcatgcttaggggatcagagggggaagctatggatcaggagagagaaatccattgccaaagaagttgaccccaagcacacagttgtcagaaagtggagttacattagaacctggggcatgagcaggcccagagcagcaatggtggggctggatgaggagttgaagctgtcatggagggagttaggatactgggagggaatgccatggcaaagtctgaacagcattggctctgagagtcgtctgtaatgtggaagatgcagctcatgtgggcagttagaacataagactggggggctggtgagatggctcagtgggtaagagcacccgactgctcttccaaaggtccagagttcaaatcccagcaaccacatggtggctcacaaccatctgcaacaagatctgaagccctcttgtggagtgtctgaagacagctacagtgtacttacatataataaataaataaatctttaaaaaaaaaaaaaaaaaagaacataagactgtgagtgccaggctgtgcaggatgccggtgtttagaaaggagcacaaggacagaagaaggaatccagcaaagatgagggactaaagcaagggctgtccatcatccgtcagcaagggtgggaagatgccctggaaaattactatgaagtagaagcacatttagctgtgttttgggacctaccagagcactagggctgataggatccctctgtctaatagagagagggtatgattggttatgggagtcaggttataagaacaaaaaggccaaggaagcccacagcctgcatgtgttttatgtctgtaagcaagagacatttaaaagcccctggtggatttccagtggtttgaggtgtgtggagtttatggaggagccttgcccaagaacactgagatgacgaactaccaccattgtgatcagaatggaaggggaggagttccactgtcaccttcctctgtccagggccacagaaatggataccactacccacaatgaggaaagaagtcttaagtgtgctaaatcaatgctgagccaccagatggactgagtcacaaggctttatttgggcattcggtccagcaggtaaacaggtggcattgttactgtgcacagttaccaagtgaggagggtaacgtactgaactagtcaggcatttggtaggacatgtctttggtacagtccagcccagaaaagtatggatgcagcatgaagcagccagtgcttaacagcacaaatgcggaatatcaaaacacacaaaaggaaacacgttcacaagccaggagacagaaagcactggagcctaatgcagtagaaatcaatacagacagatagcaagatataaatgggctaaactctgctagtaaaggggaaagactttctgatgagttctacgcagaatcaaagaaattggaacagttggctgccaaggccacttggcatttgtaagcatctcagcaggcatcagctattcatgcctcatctgaattcaagccataaagcattgcgggaagtaggcagatatgcctctcagtactgaggtgcacaaggacatctgtactccactctgtagggaacatggaagtacacagagaagcaaatgtttccttgaaatcagtgtgtgcatgtgcctagccagcctctcaaggctagagagcccgctgaggagtcacagaaaaccttgatgaggccagcaaggtggttcagcaggtaaaggcactgaacaaacctgacaacccgagtttcatctccaggacccatatggtgggaggatagaaccaatttctgcaagttgtcctcgacctacacccacactttggctacatgtgcatttacatgcgtgaacgtgtgcacacacacacacacctctcttactatagcagcatgcaacaggccctgcagccttgccacctcctccaacaatatgcaacaggaaatttgctgggatctgtccagcacagccagtttcaggggccattctatcagattctcaaagctgtgagacctgccacagcacataaactacatcagagtgtggaagcaaggggacagttctctgaagtaagcaccgtgttgcttgttcctcgccatggggaagctgtaccacaaatgacaatgtcagtgtgttaggaacaaaagccagtggcatgctaagatggcaccatccttgaggctgggaaggtagctcagctagtaaagtgcttgttgtacggggataaggacatgagtcagtactcagaactcatgcaaaaatataggagatgggagacagagacaggtcaacccctggaattcactgaccagcctgcctagataaactgtcaggttccaagttcagtgagagaacctgtgtccaaggtcagtgagctggatggctcccactgaatgacccctggactttgctctctggcctccattcatgcctgttcccagtatgcatacacacactgggacactttgtactgttcctccccatcctgtgtgcttatagcagaatgtataaagaagttatctggcttgtggttctggagtccagaaagcctggtattgggaagtcaagtgtggcaggagatgggatgtgtgaggggtgtgaactgcaggcagtgatatcaacccatggcccacccctaaggaggcttctttttccttgaagtctgctagcattgtgttttctaggcccctgcactaagcctgcaactgtttggagggttggggctgaggacactcaagaagcaagggtcagctctgggtgagttttctgttacccaggcctggggtttgtcttgctccctgtctgccacccccacctttcccagcagatgtgcagagcagcttgcacaccaaggtgtgctcgggataggcagccagttcatgtcactgtcagaaatgctgagacttttcatccaagcaatgctaattctagactacattctctctacttactctgtccatctctatctcagaatctctatagctctctcagcagtacatgaatgaccaaccatgtgtctccctacctaatcttacatcaagagcatgggaaaagagaaaggtctgtgtttatctgactcagaatgccttgtggactggtggatccgggctatgggttggccaagcaaacggccctcttccccctgaaagtaggcatccagcctggggatgctcagatgcagactttaggactttggggatcagagggacctgggctgtaagtccctgtgcatgttgcccactaactctgtgtttcctgatagctggagatggagttgaagatgctgaaggcccagacaagctcagctgaatctagcttctcattctgcaaagaggaggtggatgcactcaggtacggctccttttgacctctagctacctcacttgtcactcctaagagcacctgagcccctgccttcttaccttcccaaggctgtttctattgtctgcggagacccttgttcccactgggtttggcctttctagtgtcatgtcccaggtcatcagatggtccccagccatctccttgctcaagaggagcagacactcctgtcagagtatccataaggacctgccttcctgccagcaacatgagttaccaggcctagctccttcaaggggcacagggccatcagtggattgaagggtgcaaacaggcatctttcagagactgctgcttcacagaaaaatgaacagtcttctcaagctttgagggttagagacagcttcctgcttttgctgtgtgtatgagtatgtgtgtgttcatgtgcttgtacagatatgtgtgtgttatgggttatttccttcaaatgttttcttagttcttgagatagggtctcccattcaaccttgagctctccagttcatctagcctggccagcagtgagttccagggatcttcctgtcgctgcctccccagcacgagggactaggggcacatgtctgcacaccgagcttttcacataggggaacccaactctgaactgccttcaggttccccctgacctgcacaggctctgccattctagcttctgtctgaaacagccgtgggatgactgtcaccacagccctggcatcttgtgagaggcagccgaatgaaggtagtgagttggccactcccttctgatttgcatccagaacggacactctagggtctgtttctagcaagtgagatgtgggcctagggaacaagaaagccccgtagacattgagtggtcttttgatgaaatggtacggatcttggggtaggagatgcagtcctctctggctgggcttttggtgtcccagagactgtaaggaagtcctgcctctgtgtgaaattgcccttggctctgttaggctcttctgacgtctgtctctctttgggtaatggctggtgactgacttcctgcttcacggggcctttgaggtcaaagcaaggaaggcttcttggcacctttcccagaagtgtccagtgagtagcactgaggtcctttgtgggctcgaagttccctctcattgccaaagcacttctcacacagacccaggcctgggaaggagctctgtggggataccaggcacagagctgtttgtttgcatttgtcccagcgtggtgtatgctgtgcactgtcagggcagaacggagtggataattgactggccaggagagccacacgctctgtcttcatcagctcatagcttaatggggatattattcacgtggacttgtggctgtttaattatgggtggtgttgtaagagctggcatctggagataagggtccctgggacatgtatctgggtgcaaaaggggagcctgatgctgtggctggctgggttcttggagaattagtgtgtccctggtgagtgtcagcatttttatcccatgagtagtgggaagccattaggcactttaaaacagaagagtgacacgatctgatttgtagcatcaggcatcaggcactgctggctgcctaggccaatcagaggggacttggcaaggccaggcagccatgacttggctaagtgctgggaagcattctttgtgagcctcagccaagctggagaggctgctcctgggcagacacaccaaacacctcccactgatactccacaatatctactttgtgataaagcatgcagtcatgtttgaaggcagggtatctaaaggacctggaagtatattgcatgcaggctctgggtccctgaagccaaaaacagcagagtcaggggagccttcatttgcatccgattgggaggtgctggcaagaggctggggaactgaggtaaagtgcttgctggccttacagtgctctacagggtccttagggtcacagagataaccctgtgtatccagcttcatgtcagctggtaggcagaggacttgcatttgggtgtgggcaagtgcaagtttgcagagttggctagctgcatggcccccagtgcaactctcctcatgccgcaggccctgtgttgtctgaggacctgtcctccccacagcctctggtgtggttggtgcaagtgtggaccagagtgcatcacgtttcttgggaagagaggctgatacatatacttcaggtttgatgatttttaaattttaaaaaggggcttttctcttaacgtcttccacactaagatcaaagcctcctgtcttctttggagagcacagctgtgagtgaggtgcctttgtagctggtaagaaccaggccactgagtttggagggactgcagcccccactgccctgctggtgctttgactttccagcagagggcaagtgagggcttccaggtcattcctgtgggcttggagcatgcatggctgagaaggccaggtaagcagggcctctgtgcagtgaactcaaatggagcccatgccttgggcagatggcttatgctgggccaaacatgaaggcgtttagcgtagctgcctagctccctctctccttgagcctggcatgggtctcctgaggcctgcttcccacagccagtcttctcccatcactcctcctttgtcctaatttgatacctattgctgtgataaaactccatgagcacagaagcagcttggggaagaaaaggtttgtttggcttacatgtcccagtcatatcaccgaagaaagccaggggaggaactcaaagcaggaacccagaggcaggaactgaagcagggaccagagaggaccgctgcttactggcttgctccttgtggcttgctcagcctgccttcttggaccttccagcactgtctgctcagtggtgacactgcccacattaggaaaatactctacagacttgcctacaggccaatctgatggtggcagttccagcaaaccaaacaaaaagccaacaaccagcacagcccttcctgttgccaggagcttgcgtggtcccatttgccctgctctctaaccctccagctgtgtcagacattgtatcattgtgcctcagtttcccacggtttggtcagtggacttgtcactgttattttgagcaaggggactgtgctatgcatggcatcttgtctaactgggacccatcgtgctgtcctttggctcgagggtattcagagggcagccctcctaaaacttgtgctgaggagctgggtccttagacccatgttgctgccccagcttcccttggaagggacactggcgatgtggactctgaagtcttactttcttctagctgggcaagggtgatgaggacccttattgaggatgccctcttggaataagatccttttgatctctctcctgatcctgaagtgccttcctgctggtccttcatgtgactccagaggaggaccacttctgaagtggttgactccgagaaagagagttgacatgagagccctgcctcaggtcagcttgcctttcactcaagaccattgctatgaacatagccagccagcagatgcagaagacagggcagggtaggtgcaggtaggtgctgctatctggggcgctgtgaggatgaggatgaggggtggtctgcaactctatgtatttgcatagaactattggttacacataggggcacaggactggggagtaaacagcttgctataccagcatgaggaccagagtttgagccccatgacccatgtttgtttgtttttcgaagttaggtaatccttatgtaatcctacccctggggaggtggacagttggagccctgggactctctggctcagcctgtctagctagtgagctccaggttcagtgggagatcagatctcaaaagttaagatcaaggggctagaggaagacacctgttgttaaacctctggcttccataggcatacccagtagttgcacagatgccatatggcatgtgaattgcacacacctgtggcattggactatctctgtgaagccatgcttgggagcaacagtgcaaagctaagtggtggcaactcagggcctctcacctggaacaaatctgggctcatcactttccactgtcagacagaagctctgatagatcctaaatgtctgtgggtttagcagctgggtagactgtggtcttgcatgcctgggccagaacctgttaatcatacttaacagcttctccgttcccagccctcctcactgcctgctgggccccagcctgagcgggcattcctaggtctggggggcagaggggtaccatgacagggacattaaatatgttggcctttctcggggagaaagcaggaactctgtgactactactcagtgtgctctggctgggtcaccctctcttggacaccttttgtttgggtagcttgtcacttgtcattgtgtcttctcaaggggagcttgtctggaccatttgactggtactacagctctggtcactgggcaacccctctcctcctggactctcttcctctacctgcagatctgtatattcatggtagactgagggagcagaggtagaagcaggtagcctagtaccagtagacacaaacagaaacacctaaaattaggccacagagaggaaggggcagcctaatgtaggtggccttctgactgccgattgagttgctgactgagatctctaggaagggatcatgtgtccctaacagcaaccacctctgcctcaccagagcaaggccacaagtgctggtgcctgctctgctgagagggcatggccccagcctctagaccccgtggggagccctgctcatagccatcagtatcgggttcttgtgtcccatgatggaatgtgctctcatcccatgctgctgcctgtactaagcggcaaaactctgggatgcaggaaggtggtggatgcacaccactccctgtactgggtagaatgagcagacatgcacccggtcatcaccatccatcagagtccagtatcacacacacatacacgcacagaagctcacacatttaaggtgcatagagaatattcatctgaccacaccaaactcaaactagatgtcagtaacagaatgcaagaggaaaagctgtacccacggggaaattgatagcatggttctgaactgcctgcggatcacacaggatgtgtggcagagaagaggaacaagtgaacgctaatgaaaacacgctcatcatatcagatccgtggagagaagagaacctgcggcgcccagcgttccagctgacagagcagaagccatggccctgccaccaggaggacatggcaagcaaaggagcccaggatgagaagcaaggaggaggtaatgaacttgaaaaaagaaacacaattgagaaaaatgcagaagcaaaaggctgtttttctggggggaaaatctataaaattgacaaactgccaacaaaagtgaaacatactcagagaagcaaacgagccgtctcaggtatgacacagggacactgctgcaaagagcctgtggcctctgaaggatggcatgtacaggaacactagcttgtcactagcaggtctagtcagccctccaaaccaaaattagccccagcatggtgccccacctataatcccagcctggggaagtggaggcagatgggtcagagttcagtcattttgggctacatgatgagtttaaggccagcctgagctacgtgagactgttctcaaaggtatagacaaaacaaacacccgaaccaagatgtacagtgaggttgatgaatactttaaaattgaatcacaattaagaggctccaaaggaagaaggttccaggcccattgggttggttcccatggagaccctgctcacagccgaagcctaatgggtaccaacctgactcacccgtcttccacaagacagaagagatctacaaagtacagccaaagggagcctggcactcatgggatgggactgtgtcatggcagccagtgacacatgcatgacctaccctgcagagacaaatctgctggaacagacactgtcactgaagctgttgccattgattcagagagctgagtgaactggaagaagctctgacttgcgtttccttaagtgtacaaagttcctgcaagaccttctactcagccccagctcaacctcccctaccctgctcctggaacccctgtgggggctctgtgctgccagagcccttgtagggtcagtagcaggcaggcatcagctgtggaaggccactccctcccccactccatccatcagcttccaacttctaagggagtttttgatgctgtcccttttattttctgtggtcaggcttcagagaaatgagactgcctttattctcaactgcagtggcgttctgagagattgctcctaagtgccgtgttcacatggccatctttatcagtccctatgcttgcttgtatgtgggtggggtttgttactgttgctgtttcttttctaaggtaaagtttgctatatagctcaggctagccttgaccctttattctcttacctcggcctcctatatgctgggattaaaggcatgcagcgtgttctaccatgcccagctcatttgttgttgttgttgttgttgttgttgttttgtaagtgaaacacacatacaagtcaaaaaaagaaaccaatggaaaacaaagagaagcctgttatttatactgtcagcaaacagtcttcacgttgaatgtgtgcgcacttccccatgtccctggctttctgcaatcatctgttggttttgtatcactggacatagcacccagcgcctgcttccacccccatgagtgtgctcctgcatgtacaagggaacctgtgtgtgagggcctgggggcacatgggcaggtctgtgtcacaggcagcgggacataaatctcatttaacattcctcagaaactacttcttatcttggtgttttgagtcctggcctgcaacttaccaagcagattaggtgggcagagaacccgaggttcctcctgtttccacccagcctgtgtaaacacggcctctggggatctgactcaggctctcctgactgtgaggccagctctgtacctttgtgtgctgtgcaggctcctttgggtggctgtgaacaggtagtggatgtggtcatttaactaaatggcttgctcagctctggtccagcatgcccacttgggtggactctgtgcctgtgatctcttagcactgacatctcccactcagcatagcacctgtgggggcatctctttaaaggaatgtctccccccatggctgagtcctgaggcaggaggtgcatcttcccagttggcttttctttttctgtctgctttgccccaggtagcctcagctctaagctcacctgtccctgaacacaaacatcaataagatggctttttcttattttttaattatatgtaaatttgtgtgtgtgtgtgtgtgtgtgtgtgtgtgtgtgtgtgtgtgtgtgtttgcatgtgcatgtgaatgcaggtacctgtgaagcccagaagtgggcaccagagcccctggagctagacttgtggacagttgttagccagccccagtggatggtgattcttctggaagagcagcagtgtttgtaactgctgagccattgatctccacgccaggtatccacgtgcacatgggctttcttttctttttcttccctttaaaaaatgtctttatttatttcactttattttattttggcaatgctctgcatgtcttgggggatcatctccctctgccttgtgtaaatttgtccccaaatgttttcttctctctgatgctgtagcagatgaagtgcacagcagagctcacacgtggtggtttgtatggtgctgttttggtgggtttgtgcatcagcagggcatcttgtgatgaggagtggtttgctgctgttatttcattgtcttgtctaattgctttggcagtttagtcagatgaacgcagtcagagcaggcattgtctcagagttttaaaaaattacttaattagattgatgtgtgtgtgtgtgtgtgtgtgtgtgcgtgcacacgcgtgtttctgtagaccccctggagtaagtgcggaggccagaagatggcactcaggagtgcgttctctcctttcatcctgagctggatctcaggttgtcaggcttggtggctgcaccttaatcttgaggaaatcttgcagctgtcttccctgcttttgttttttgtttatgtgcattggtgtttcatgtgtgtgtgtgagggagggggtcagatactctgaaactggatacagacaattgtgagctgccaggtgagtgctaggaattggacccaggtccccctgaagaacaactgatgctcttaaccactgagccatctccctagcctttttttttttttttaaaaaggttgtttgttttttttacatctttgtttttgtttgtttttgttattgtttgtttttgtttcagaaatgacatgtcctgttgaggttgctgccctctgtgttcaaggtgacaggtttggtgaagggattttcctgtgtcaactgagagcggagtagaggagagcttcttgtccttgctccctagagggtcacacagcacagtgttaggtgttgagatgccttggatccctgctgttttcaaaccctttgccatagcatggaaagctttcagggaacggctggcatgtggctaagtgagtccacacctgtcccccatgtttatgtggttaggcttgtcccccaagtttactggtctcagttctagttacttcttttaaaaaataattttagtttttgtttcatatattcatttcattttaattttaggtttgcagtcttgcagtttgaacccatgtcctcacatgtgttaaacatgcacgctacagagctaccttcccagcctttttctgtggctaccttttacattttggaacaggatcccacaaactgctccttgaacccatgagtggcccaggaaaacccttaattcttgatccttctgcctcagtctccacacagctaggttggtgggcctataccccaggcccagattggccttagttttctggaagtgtctttgcctctattcagtgtccgtcagctgctggtttcagagagagagcttcctcattcctttctctgccaagttgggcaagaccatatgattctttgagtgtttgcttgtgctctctggcctggccttcttccttgtttgggagactctgacttcccttttgaccctcacagtgatctcaggtttatccgcttctctgggggtcaccttggaaggtcatcagtaggagtctgcctgtgccatcttggctactcagatgtgtgcccagttgtccctagcatccttttgtgacctttgtcctgtggtgccctctcacagcttccaggttcgtggtgagctcttctctctggttggttttgcttgggagtttcctgtgtaatcgttcacacaacccaatcctcattgtctccagcctgctgtcagctgtcagctcgagctgctctccttccctgctttccttttggactcatgtgacatctttgatgtgacatcttccttgtgtttggagccctctgtttcctcttagtgtttgtctctggtgtctcctaatctccccagtgaattcttttttatcccaggataattgtagtttcttacttttttgttttataggtgtgtggttgagtatgtatatgtgtgagccagttcagcttcaggcatcagtcctcatagagtctaacatctgccatttgagccagaatctctcaatggccaggagctcaccaattggttctcaaccttcttaatactgtgacactttagtacagcttgtgttatggtgattcccaaccataaaattattttcattgctacttcataactgtaattttgctaccattacaattcctaatgtaaatatctgtgttttccattggtcttacgtgacccctgtgaaagggttttttgacacatatcccacaggttgagaaccactgctctagtctcagtctctcccgcactgggatcacaagtgcgcatcagcatccccagcttttcatggcagtgctggaacaataatgtagctgaattttgctacttagtaggttttcttctaccatttcccatccccttttttccctaccatttcaacaccctaacactagataagagacagagaaagagacaaagagagacagagactcacagagagaagagaaaggcacacagagagaaagagagacagaaagagagacagaggggggttgaaaggtgggtggtgttttcattagactactaaccgctggttaggggcactgagttccttggggcaactttgatcttctccatcaggatgtctaatttcttcttgtagttgtttcttctttgcatatgactgcttaacagaccataactaacaaccagccaacaacccacatcacacctctcaggacctagcatttatataccctctaaggagtcccaggaattccaaatgtcacacagtcacagaatctatctgcagctggcaaaatcatgcccctgccagagcacaaggcagatcatagtctgctaacgtggacgatctgaagcagctctatatccccacacctgggattaaaatgaaaacatattcttatagtatttctgtggttttttaaaagaaactaaaattccacagttcatggaatagaactcaagttctcaggccttcaaagcaatcacccacaaagccatctccctaacccctgttgaattactgtctttacagttcctctgccattgatctccaacttcatttatggcaggcattctactaaatgaatatactaagacttgttttgtggccatgcattaggtctgttctggagtgttctgtgtcctacttcaagccagccagaactacacagtaagatcctagctcataaaactgcccttgaattccccgccccctcttcctccatttcagctggctcacaggtgcatacccatcacgctcagcctttccttaaaggggaagcctggcttgttgacttgagatgagagcattggatacattctgtctctaagcctggctttcctggatacgctatgtccagttcaatgtgtttgctaatttcctttactttctttgagcagtgtatttagtgtgtgttgttacatttccaagtggccaaagctttgctcttggcttgttctggtttctcctttagtcctgaagtgctctctggacacttcctttccttttagccccttgtagctgtctggctactttgttatggactcttaaactacacagattttaggaactgctccattttatggtcagtggtcagcacaacatgaggaactgtattaaagggttgcagcacaacaaattaggaaggtttgagaaccacagttctaaagactcctgagttgcttttccatttgcagtttctcctctagcctgtggtcactctccagggtgaaccagggggcctgagacagattccttacctgattctagccaagcttcagggtcagccaagaacccctggcttgagtccttccttagacctaagtaagtgctgtccactgctgtcctcccactagggccatgaccttccatctgtgctggactgcagtggcacctggttatgtcatggtctccttgcaggttgaaggtggaggagctggagggtgagcggagccgtctggaacaggaaaagcaggtgctggagatgcagatggagaaactaaccctacaggtaggtttggtggccagagagaggttccctgtagacagtactccttccagcccctgtgaatgaacctgggcttcctcctatgcatcccccccttacctggctgagagctactgctgggttctgcaggaccacaggtctgggccactctggctcgctgtgcagggaccgcttcatacccttggttcttgtgcttctcagcactgacctcggcctctcttctctctggtgctgtaccctgtcactcccatttccctgtggtcatgaccttctctgctgtctgcattagactgtttctcttctttttagttttcctcctcctgatcacactgctcatggcaagaagcccacaggttagagattgcctggcttctagacaggccattgatttttaccttggcacctattagaggcaatcaaattgtgtccccattaccaatcttggtgatgggagaggtgacaactttgatgaagtgaggtgttctgaaccttggctgtactcatgccgagccctaggacctgtcatcctgttctgttctaattgggccactgtcctgggctgagggctgcaggagggtgaatcaaggctacctggctacagaactgtgtcaggatggggtgataaatggatttcagtgcagctcacagagacgtcagggacaacacaactagaggaggtgccagtgttctatgccccatgtgggtgacataagaatgggattcacaagatctcctccccacagcatcacaagtgtgtgtgctggcactgttcagccctgcagctcagagccttcctgagggccagagtgctagtgaccatgtccacccctgctctgtgctgctgtgtgtactgtgtgcaggcaggcactaagtgcatacgtctgtcaaccatactcatggcatggccggagacagcatggagggctgagtctgtggccctggagagcagggtccatgtcagctgatgttcaggaacccaggaatggtattcccagttggcatggaggcctgaggtgggggagaggcagctgttgtagaaatttctagacagccccatagaccctgccacctctgtaggctgtgcttatacttcagaaagggaccttaccagagccagactgggaaagcggttactcagagactgccccatgaggcctaactgttctgtgtgggcttctcctccaccccacctccacccccaccccactgctcttaggccagggttgcttgctgtcctccagcctcactctgatctcagagctggaggctgtatagcaggactccctgactcctgttgcatcctaaaccaccttctcccctagccagtactggacctctgctagactccccagatgagcacatatctggaagtccaggtgattgccagagtgctgggctctttgctctgtcctgtactattcatactaaaggtctttccatgtgaggctgtgcccactattttattagtaaataaaccatttactcaagctgtttggtcatgggagtttggcccagttccctctacataccagcctttcccctctgtgtccccctatacccttgtcagacaaacttgtgggtgaaccagcctggcagttgcctgtgtcttgcataattgagtctccttcctaggtcactggcctcagctccagggccccatgctaactgcaagtctgactgtgtctgttctgtatgtcccagctgttggcacatctgggcagggagggtttttacaccaggattgaactggttctgcaagggggcattagttacctgcggtaaggaacagtccctgtccaatctcagtgtcagctggctcctcatctgctgtcccttcagtgtgttcaggagcacctgtgtgagcagccagtttgtaacactgaatgcagggtggctgcagttcctgagcacatgggcacagaagctatgacacatgagactggtcctgagggaaaggcaaacgggcctgggtttggctcagtagtgggcaaggaggtgacttggacacatgaaaagagaaaggccgccacctatgaacacggtgggtgggcttgggcgtgttggtttctgatctgagctgctgcactttataaggctgggtgatgaggattcttgagggaatcctgtgctaggtcctttctctcccccatgccccactatcccccaactgccttcaaggccttgttagatgctctgacattccttcttcatctaagtcaaagccctcgttcccattatatgttggtcttggacctgggcaccctctggtactggggaagaaacattcatcctggggcttctccgtatggcctggccatagcatttgatgccggcccctttgagacccagcctcctctgcagctctaacggggctgcttggacctggaatcttgtggtctagcctttgggcttcctcaagccttacccatgtgctcagtatgcaggcagcctcctgcgctcccactcccgcctcactcttccctctagagaagaagagtggcttcaagttggcgcttcaaggaagattgattaaaatcagctgcggttcatcttaattgggaacatatgctcagagagggagctcaactagttaggattttttgtaattagttcacagctggttggcggggaagcaaaactctggtgaccacttagagctgggtgtgtgggcgtgcttgggggttcagtggaggggtcatcacagtggctgaatgcagacttaccaagttgacgcacgccatccttcctgggtttcctgggtcattggctgtttgtaccatgacctgtgtgcattgctagggtagctagggaataggaaacgggtactaaggtgtacttgtctaatggacacacgccaactggctgaatggacggctgacttatgatagacagccctggcagagcttctgggaggttagacactgtggtgcaggcctcgagtctcagcactatagtggctgttccgagtttcagagcctaggctacatggtgagatcctgtggaaagtatgggggcaggtgtctataggaagaccttacttagagatggggaaactaaggctggcacagaggcagatacagggattgccagtctctgtccttagataccttgtgctttccctaaaagcagggacagctgctttattacagagaccccccatgttcctcatagcctcccataaagcctccacatagtgcttctgatgagctaggtcaggacagcttggtgtagagtcaccaaggagaggcctgccaggggctctgcccaccctgcatggtgacaagtgaggttcctccatttgaaacgtggatgcctcctgggtcccacactataggctaagggcagcctccatggactcgggccctactgcttttccccagtgttttaactgcaagcgttttcaagatagagaagtagaaagaattttacagtgaatgcccacttacccaccacctacatcctgtcgggaatggcacacttgtggctgtatgacattcctatccatccctctgccatccattagttcgttttattcttttgatgcatttgaaactaaattgcagacatctgtatacttcctctaagcactcgagcatgcatgtaattaagcgaattcatctctggaatctgacgcccgggcccccgccgtcccacagtatcgcctcatcatagagcagagctcctccctccaccagtgaggctgtgccagtggaccccagtgccaggcctctgagctggcacattcctctcacagtcaggggaggctaggctggtgtccataccaccttacagtccttctaaagtgctgctcagaacagagcccagacggctgcccagtgacatttaaaatcagaatatcttttttggaaatggagtgggcagaaaattgctgggtttcctgcaagcggaaagctttctgagcctgcagacgtccctgctcctgtctgcgtcacaagcagcagtgcggttagggtgcccagccttacttcttcctgtgcccacacctgccgcacatagttctacaatttcaggatgtcacttaccatgagacacccatgtcaggcaagaccctaagataatgaaaaaaaacaaaagaagaagaagaacaacaacaacaacagcattgtctggatccttgagctccaggttgtgccagcacaagtcccttacctgagtgctgagtgacactaaggaggtggcatcagtgctccctgtgtgaaggtcatggatcatgggagacgtcagagcagagtgttggagtgtcctctaggagcatctcacacagtccctgcccactgtgacttctcagcccagttctttcccaaagacctgcactgtctgtgaggcccacagagcaccgcccttctctacgtcatgcagtggtgccaactgcactggccaagccagacactcctcttgctgctgtcttgaactcactcactctgcctcacccagctatggctagcactcctgtcctgcttggcgtagccatggccagcactctcctctctaggtgtccacagagactgtgttgttgcagcttttgaccctcaatccctgcccaggtcttcagtgcagctccccatgggcaatggcctacccctctagcagacttggagtcttgattacagtcgtgggagtagggtgaacgtagaggctcagcattgtctacatgcctgttctccttgcaccagcatgtcaactgatgtttcttagtctggagacctcctttgtgtccctctggaacagacctgcttttgtcttgtgtcatgctctatgcactattatgcatggacagtttctgtgtgggaactccttgtggaccttcgccagtctttcctattttttcccttcccttttcttctttgtagtgttcagattgtgcccagggccttgggtatgctaggtaagtgctctactgctgacccatgctccagcctttacagggagattctaggcagatgctctaccattaaactatatccccagccttctttttcttttttattgtgagacaggttctcactatgttacccaggttggcctgaaaacctgctctgtaggccaggcaggccctgaaggacttgtgatcttcctgtctcagatcctgtgtggctgtgataccaggtctcacctcacacccgactatgccttagtattttgcacaaaataagcatatgtccctcctgactctgccttataccgggcttgggagctggccttgacagagaggtgctcagcatctctcctggcatggcctccaagccctgccttgcagagtatctgtgaggtaagatgctcagtgaaaggacagagcacagaccgcagaggtgagcgcaggcagctcatgtttattaacgctggagactaaaaacagccggcttgctgataggcattagtgtgctgaattttcacaggcgctgatttcttttgattgtttttgagcaactgatgtaccctccatactaagcccctcctcctcttgatgtcacctcctacagaggttagtcccttgggcctacaggcccttaagcaccaactacttcttgctggagcgctgaacttgctggaaccctgccttctaatgaatccagggtcctcatactccacagatcccaacttggacccgtagacccccgactgttgcctcagcaccctggcttgcagttagcagtctcgtcaggcgactgaggttctctgacagtctcatgtgtgcccaatggttccatcttgcagtagcttgtgcctttctagcttattcccattggcatctctacctgaagcctgctcagcagcacccatgacccagaagccagctacaaaatctgtcttcctctcttgatacatctaaggttttggtgatctcacttttacatgacaagtaaaagggaaagggagaaaaatagaaaagactggtgaagatggtaaacgcccacacagaaactgctcatacatgcagtgtgcacagcaagacacaggacaaaaccagagctattccagacggacacaaaggagatcccaagctggcacagggaaggcagacatgtagacatcatgtaaacaaaactgagtctccttgtagaatggtggttcctcctcctcctcctcctcctcctcttcctcttcctcttcttcttcgtcctcctcttcctcctttttcttcttgctattcagaaatagaactcagccttgtacatcataagggatctactactgagccacacccccagtccctcactggggtctacacaggtgctgtaccactgaaccacacccctagtctctggttggttgattctagtcaagtgctttataactgagccacattccaatgtcccagcactatagaaacctgtgactaatattttttggtaaattgacattctctcacacattgttctgcagaaaggtacactgagaggtgagcatagtggcaccaacatggagactgtctacgcaaactgcttccatggggagctgattgaatggaacagctgccaagggccaggataactacatagaaagaagagcagtgctctatagggtgtggcatagctggcactattcagcatcctttttaccatctgcgcccaaaacagatggtctaggttggtccaggtggccggcccttctttcagtggcagccggttctctgttcaaatgaagcactctctgccatcacgtatggtgttggcagatatactactggctctgccattatggataagactctgatttctaggggaaatgtcttgagaggttttatgctgcttgctgtggatgccatgaccattgaaagacccctttggagccttcgatcttagcagtcagcagtctgaagcaggaggacaatgagttcaaggccacctcaggctatataaaaaactcagttttttaaaaaacaaaacaaaaacaaaataatctgaaagcacgttgatttgaccatggtctgtcaagtttagaaggttcagagacgggatcggaggaatattcattcactgcgctcacatggagcactaatgttcgtgggtagataagtaaataaataagccatggtctttctttatcatggaatgttattcagctcagaatgaaatcctgccacctgttgcagtatggagatactgaagactttcactaagaaaactaaggaagtccatgctggcggattcccttgaatatcagattcctagagatgcaaagtgggaaagtgggagctgtgctggagtgggggcagggagttagtattgaatggcactttcagcgggggaagatggacattctggatggatggcagtcatggttatacaactttggatgtgcttaactggctgcacactgaggcatggttcagtgggatattacacagttaaaaaagtagtgatctggcttagttggtagagcactcagcatgtgggaagcttgagcttttgtcccagcaccacatacactgggtattgggtgcacacctgtaatcccagcactgagctgtggaggaagaggtcagcatcgaaaggttcagggtcatttcctggcttacacagtgagagcaagggcagcctgtgctacatgagactgtctgatagagacccaggggcagggatggacgttcctgccatacacatcaatgtgctaggggtggtggctctcaggccccaccctcacagactcctactcagccctcattgacccttgaccatcatctcttagttgatccttctactgctggttcatgtctgtagcctccttccactgtcaccaagaaccaggcatggaggttgggcagcagccagttattatacagtgaggaggtcatgagaacagacactacttgctttccagagtttcttctgactggcccattgcggggttgctgagaatgacagcctaagctatggcctggtagacacaaacaggataccttcccctcctctaagaacagtttccacttcatgtccacaccctaactatgctgataactaagctcaggtagccaaccttgtcactggcagtcaggctgttgtcattctcattgctgtgtgtcacaaggctgagtttaggatcctgaggacagtccagctcatggctgctggagctgggccaacagttgagctcagttgagttggtcctctatgttggttctcaccttaagcaccaccatacatcaactccggagcctcagacttctagacccatctgccttcctcatttgctttgttaagagcattgggttgcaagatagatagagaaaggagggagggagcataggcccagggtctggagatctgtcctgacaattctctggcttctgctgtggccaactatctctgagctgtgtgtagcctacctagttctccgcagtgctgtcctgtgttgtcctgtggtgactggtgcagtttgttggaaggcacacagcactgcatatccccaggtggtcactctcccgaactgctgccatagtcccagagtctcactttggctttgccagctctgaggggatttttgtgtgtgtgtggtggggaggggtggttctgagcctatctgaagcaaactgaatcagacagtttttcttgctgaaagagtaaggatgaaagacggactggtgaccccaggtcctccaggtgacagagggctttgggacacaagtgcttgaaatgtgtggctccttctatttgctgctggcagcacttctgattctactctgatggacaaggactgatgggtgtcatctctttacacctggtagctcttggtaatggtctcagtttggtaggcattctttatagttcttaggggtatctcgaggaaacctcagatccacggaccattgagagatagccacctgggcatgtctaacatggggctgggggcagggtcaaatagacaggacttagtttcagcactttagctttagggatgaggatggacaggtggacaggcagacagactttaggacctaaaagcattgggttggttgaccctttggcttttgaccccatgagccacctaggtgatagctgcccaccctgcaaagctgttgcaaagaacatgttcacatctgcccaccctcttgtccttcccaaggacttggagccactaggtgatacccacggcccaggaacagctgaagcctgtagaggaagcagcccagtaggctcgtttcagagcatgagggtctgcttgggactgtagatcactgacttccaggccaggcctggccccgccaggaggcccaaacagagcagctgaagagagaaggccctaggcatcctgaagcggccaccagcctcctgcccttctttttgagctctgtccgagtgctggcctgtgcatgagaaagtcagataccccctttccctcagatctacattgaccagttggtgttgcccaagtcttgtgctggaagcctgaagtgcatccctaggcaattcattgagcctgggagaacctgccccaagagcttcttgtcccagtttaccccctcacaacacatacacacacacacacacacacactcacactccagttctctcatgttgctggctgagctcacagcccaagatctaaaggactagatatagaagaggctaaggtctggtatgggtagctctctaagctgtcccctgcaaaggggttgctatcatggaagccaccaacccttccttggataagcaaggcttacccatagtcctctaggactgtatactgaagttcagcagtccagcctggcatctgtgctgtggtaacatatcctgtcccgttttgtgatctaccatagtcccctgaaacaggtacctgagggtgtagcccatccctggagttgctgagggcagatcagaagtttggtccagcctggcctcctgaataagcaggttccacagactgtggggcagaggaagccacgtagtgaccacctggggtcctcacttgtagtttctgctccttcctcgatccagttctgcctgctactcccagacccacccagcagcccaacagaagcctcactttcactatggagctgcagagctcagctgggagaggtattgatttagttttgagttgagtgacttataaatatgcatgaggatcggcagttatttaactgtgctttttaattctcctcatgttgctgcctctttccagcagggtctcttgctattccagtcaggtacccagtggcaagtggtcttggcttgctgcctggaccttccctgggacaactggacccagaggagtgaggttaggggcagctgttctccagtggggacatagttgagaaatctggttctattttagggtcaggagccaggggttgctttcctctggactttagtttttaattttcatcatgtttctattatttatttatttatttatttatttatttattttgtgtgtctgtttatgtcaatatgcatgcaccatagcacacatgtgtgaacaacctgtgggcatcacttctctacttctatcatgagagtcctagggatcaaactcaggttgtcagcattgacaagtacctgttctctttacctactgagccatctcacaggctaggttgtctgtgtgtgtatacactcactatatataccttatgtgtaccatgtaggtacttacaggtgcccatgctggatgccttgcagctggagttacaggcagttgtgagccgtctgatgcaagtgctgggaaccgaatgtgggtcctttataagagcaataaacactcttaacccccaagccatctctctagcccagaagggctctttttgttttgttttgttttgttttgttttttctgagacagggtttctctgtgtagccctggctgtcctggaactcactttgtagaccaggctggcctcaaactcagaaatctgcctgccctctgcctcccgagtgctgggattaaaggtgtgcgccaccacgcctggcagaatgtttcttaaagaccggattcactatgactggggagatagttcagtggataggacccaagttcaaatccccagccgccatataaaattccagtcatggcacatataaccccagcaatggagggtaaagacaagtgaagcccaagagctttctactgactaaaacagtgagcttccaggtcagtgaaaagactctgtttcaagtcagtaaaactaagaacagcagaggaatgaccccgccccgctccatatcctgctctggcttccatatgtgcctgtacattcgattatatgctgtacactgcacatactcagacacacacaaaaaggactaaatttaccatgttcccttcacagaggaaaactgaggcctgggggctcagagggcctgtggaaggccactcacactcatctctggttggagagcagttggctggtcacctcagcttatctggatagaaggtcacagagtggacaggaagagccatctgcccttcagagaatctgtgccatgccctggaggagccgctgcacagacctgccagtaccactatcgatagatctgggcaggggccacagaaagtccccagtgttgacaccttcctgccatacacactgtctgtcagctcctgtgtatccaccatcattagcagaaaacatcagctcgctcgttcagcaagtgagatgtttttgtttagtcaatgattgcatcgtggtttcaaaggaaggttccagaattttccttttgagattcttgtcagtgcctccagtttcctcagctgcgaatcaaacaaggcaacaaattttagcagcagattacagccattctcccctttcttcctcaaagctgtcatcctgtggcagactcagcgaagttgctcacttgctcccatctgttcgtctcgcatgctcaccggccccctggacagtcttctccatattagtactgatgtccctgggcctgaaacaggcagcaggtgtgcctgaaagccaagcagacacacaccaatgctgagacaggatctggtgctgtgggcatgagcgaggcacttttcttctctcgagtggtctctgttgcctctgctgcagttagaagcatgtgactgcctggtccctcaattgctcagacatgcccaggcactgaagcaggtatgtctggcaatacctcctgggcaggtggattggcacattttagaaggcactgacctgtttccctggcctgtggtagcccctcagggtctgtccagcttccctcccatgtttgttatgtagttcttggctagccctcccttgcagtaagggccttggtgtgtctggtggtggtagcactgatagctctctctggtagtcttgaggctacacaagccttaacatgggtgacacccacccagctcacctcctgcaccatgtggccctgacctctgccactcagtttccttcctagtccaagcttgaaaccccttctctcagccctgctataggacttgagcacagaaacctaggtgggtgctgggtgcacacatgacagtggactcggacgatgcccttggctctgccttctccctatatgtgatagctacacacagctgctccttcatctgtaacccttgtgcctccaggttatcatgtaaggaagagagttcttaaattggggtcacttctgtctgcagcagcggccccatagctactcaggagtagagatgccgtgtctgtcacaggagggaggccggcgtgtttctctggacctcttggttctttatgcttcagttggtgatctgatttctaagcgtgtgaagtacattctggcccgagaaatgttctatttgttaagcattcatccggtagagtctgtgccataccagacacactgtcagtgccagaagcactgtgaagaacgagacagacagccctgtcctcacggagctgacctctgctaggggacagctaataaaacaagtgtttaagatgacgaagtgtgttataaggtgcaggtgcaagggtagtgatgggctgtcacttgtcgcctgtcagtgcctggctgggtacttgttttgagtaagcactgatgcttcgctgttggcttctgttggcttcatgctctacggagtgagacggtggcctgccttggaactcctcatggcaggaggggctcaggctggtgcctccttcctccctaggatctctctggatccctccctccctctctctctcacttcctccctccttgtctgtgtatatgtatgtgtctgtctgttttttgaaacagggtctcacttgtagcctaagctggcctagacctcactgtatagaccaagctgacctcaaactcctagagatcctcctgcttctgcctcctgagttccgggataaaaagtgtgcaccaccacacccagctctccccaggagtctcacaatgtcttctgtgttgtgtgctcagtatggagctacggaaactgttccaagaccagttattcctcccctcagcttgagatctcccagacccaacctgtcagcctctatagcacccaaactaagggtttagttgtaggttttaaagtctgtaaaaagaaaaatcaggactatcttaggctacataaaaattcctgtgtttgggtgagcatggtttcattggcacacgtgatgcttttccctgccagttcccacgcctatagtctgtggctgctttctcaccaagctgtgcagtgggcactggaacaggcggtagccctgaagagctggctggctccacaggcagtggcaggctgggctctgatcccttacccagctcccagtgcttggcctgggcagggaagccgagatgcgtgtccagccccagggctgtcacagcgggcgtgggtgatggatttcacatgcttggttatctccccgactggtgaaattgcacggaataacagactgttgaaattgcacaagtaacagtctcaaccctgaaagccagggaatcagctagcgttccgggagcctcttcatccccagggctttacaagattctaaggaaagctctgaagagcctgcccggcctccccctccctccttcttcctagttctggctggtggcctcctccttcccctccttctgatgagaatatactcaggatgtgatctgggaagccaagtttgcaagccctactgttccctgcaggtagttctggcactctctgctccccattccctacacacacacacacacacacacacacacacacccctatcccatatgaggatcttactgttctgctgctcctcttaagccctcgacgcccccccccccccaagcatatctggaggggtggctaaaggctgacagactgtgtgtggcctgggtgaggtactccaggtaaagatcatactgcccttcggcactacagaggggcagtggcctacagcagcttagctcatggttcatggaggcttattaaccaccggctgcctcactaaatgagtctcccagcttctttgctcctttgtgcctggtggtctaaatgggtgggctatttcctgttccctcagcagatatcctaggagggagactaaggccagaggagccaggaagcccctttatgtagacatggagttcagtttcccttgctgaacatccactggcactggggctttgaagattggatcccagatccatcagcttagggcttatcacaggccagttctctgcctccattccaccctctgtgccagccctgttacatgccttagagcaggggtacctgcagagaggttggccagagaagacaactaactccttgtttgacttcctgagtcacctcagacctcactgaagtctgtcttgggcccagtggaggcagcagagggcctcccatctttaatgggtcccttcagtggctttgcggtcaccaccacatggcacactgtggtccccaccacatggcatattgcagtcaccacccattgtctactcagtgccatgcaagactatacatcccttcttcatgggatgcctgcttcgtgctaggcatatggctgtctcgttgctgcagtctgggctttcctgatggctcatgtgtgtaccattctgtgcttattggctcttcgggttctatgaagtatctgttcattcattttgcctctttttcaggggctgacattttcttgattacttttgagttctgaataacatttaggtgtgagctgatcaggggaatgaacttccgagaacagttccactctgaggttcacctccttccctaggacccagagtattttcaaatataatgtatcccctcccccatgccgccgccacacacggtccttttttcctttttgatgtagcccatataaacttaacagttctcagactcataattctcctgcctcagtttcccgaatgctgttgctgtacctgcttccatttctttctctcacaccaacatatggtctgtcctacctgagacgtcatcaccacaggatgaaactgtcctccattctcagccccgttcagggctggagaggtggctgaagggcacccacatgggagtttccagctgcaactccagttccaggggatccagcacctcttctgatctccctggacccaggcactcatatagtacacacatatacacacaggcaaaagactcacaaagtaaatgaatctataaaaaatgtagtccagtcttttatatattgacctggctttctggaattggcatctgtgtgtgagatgttgaggtcacagacatcctgtccaccctctccagtgccactagtctcagtcattgcctttggaacatgtggggatagatacctcctagaatcagccacattgctctcctgtgcttgtccctggcttgaggaagcaaatgttggtggatggcagtcctgggctaacactgttagcttctgttaggcactggagtgagtctgtgagaactctctttgctgcagccatagtttccctgtaaagccatcctagggagcaaggtactcttgtgtgttcagttctgggcctccctttcctagacctcttgcagagagggatagatggcaggcctcacagggctggagaacaggcactatgagactagtcactcagtattgacatcaggattcattgggtgtggacaactgaatgggacacaggttatacatgctaggcaaatactgtactactgagccacaccctcagctctcactgactgattctaagcaagtgtttcaccactaggctacatcctgagccctgcccccagcccctcactgggggattctaggcaggggctctacctaagtgttgtaccactgaaccttgtctccagtcctgtttatttgagacagggtcttaccaagtaacccaggcttctcctgtactcactctatggctctaactagccttgtatttacactcttcctatctcgcctacagtgtagctgggattacgagcctcttgtcccttccaggacatgacattgaatatggtatttaggtgaattgagcagggtgttggtgtgtctagaacacctgtgatggcccgaggagaggaggactgtttcgcttattttctctaccagttctgtcagtggtctctgctctctaagagatgagaccccagattggtaacgggctcgcctgcacacgttgtacgagggttgtcacagcagctgccacactgtgtcttccaccaaatactcatgtgctctgtgctcctgagctcttcatccgtacccggtgaccctgcgctctgtttgctcctctagggtgactacaaccagagtcgaaccaaagtgctacacatgagccttaacccaatcagcatggccaggcaacgccagcatgaggaccatgaccggctgcaggaggaatgtgagcgcttacggggacttgtgcatgccctggagagagggggccccatccctgctgacctggaggctgcctccagtctgccctcatcaaaggaggtggcaggtaggtctactcacccagtcctctgctctctggaaaggtatacacatgggttgcatggatagcctagcgcactggcccttgcatccagctgagatgtattgcttccctgcagccttagcaaacagggttagtcatccaagtttgcaagcagctaagatcgtctcagaccccccaaaacaaattaataccatttatcagtttatatgtggcccattaatcatgagtaaatccaatcctcagagaaaacaggaccatcgttcactggcctaagcacacatctcagagcccagggccctttgcagccaggcccaagattccagggaagagacagtcagtgcctctcaccaccttctccagtcagtaagtcaagatgacagccatcagaacatgtacctggcacccttgaggcattgtggtggccactggcatccatcactgagccttggtaagcaagccccacctgctttgctctagagctctgaagtttaaatttgtgggtccaagggaggggcttgcactaggtctgggtgaggagggacctggggcaaagtatgcttgtggcaggtcctgcagcaaccctgcctgtcctgagaccactcttgttcccttacacttaagggtgtttctggcccctgggactggggtgtgagtgtggggcttctgttgtcttgaggtttatgtcttgcacgtggttctcagctacttctcgttctacagtcactcctgttgcctttctgtgtatccgtcttctggtcctaaggaggcacttggcgtttctagtgagagtcttaaactagggagggtgaactgtcatcagagagcccttcctccaggactgatctcaggacagagtggcaaagacagatcctcctgcactctttgtccctgcagtcctgtcttggcttcttctgtttgctgcctcagcctgggccttcatgaagggctcctgaagacagtgtcgctccaaacctggggacctggagtgattgaaggcacatgtcaggggccaggccccaagggcccaaagtctgagcaagaatggctggctggtgtaccattttttgtcttgtcaagcagaagtgctctgagacgcagtcagtcctgggcttctatgcagagagcctggcatagagcaggtactccatatgacttgtccgtgtcgttacccatagtcttgtgacctggctttagggacacctgccagcttttgtgctctactctgacaggcatccagtttgccagtggcctttgtgagtcttgtgattcctgtgttgctgtaagggtcagctccgagtggcagattgtataggtcaggaccatgtgtctcttggcagcgtagaagatcctgttggcttacactgtttctcttttcatgagtagtcggcacgagtgtgtgcatgaagtgcagatcctcactctcctctacccttctccacgtcaggttttcagaatgaaggaacttaacattgaccctcttatatgccatgtgtctgtttttccgcacaccacacatgtaaaacaacccagtctggaacccagtcctcctgggttacagaccactcactctctgcagtgagcaggaataagccctagaagctctgagtttgcaagctcaacacgggcagccagacggaggcggcctctataacagatgcacctgcctgtcactggctcccagcagcccagactccgtcaagggagacaattcagtggttttcaggttccttctgaaaaaaggttgaccatgtgtgtagggaccaaaatccagactcccaatgctgccggtgttcagtgtgtgtggccccctgctatttctggcccctgccagcgagctggttaattgcagtttaattaggcatgcattaaaattaaaacaatctcatcttgtcagagtgacacattggaggtgatcaaatttatcactgcttgactcggcacagcggatcctagaggtgtctctggggaagagagagaaagagagctggcttgtgggctcctttacctttctgcctcagggcctcttttgggcttgagggtggtggcggaacataggttagctccggttcttctatgtagcacaggctgaccttgaactctccattctcttgcttcagcctccttagggctgggattaaaagcatgcgacattaataactgactggggttgacacctgtaaacacttgacacttgacacctgggcctgaggcaccattaactacacttggaccatgtaacttccggtgttccagcctgggttcacatgttccccatatcagtggccctggttgtgggacctaggtcagctggagtggcaagggagggtcagggattccccagtcagtttggcagctttgctttgatacaggccagtcacagtccttgtcatcttggggagaggtagactgagcagtactcaaatgggaaagatgtccgctttggggaaatgtcagtgactggctctaaagcccctgaaccacagcgtctatagcataatgctggctggttgggtatgtgcccagtgcagcaacctcccttccctttcccatgtataacagcaaaatatcattgatgcatatgatctgtgtggcagggacagggacacaggatgaccatatttaaagaaaaaaaaaacagaaactgacattattttaaaaataaatgtattagttttcagcaagccacagaatacttggtacactgtagaaactataaaatccagagtttggtaccataaataaaattttattgaaacatggtctccttgttgttaggagtacacagctgcagagttgagctcccagagactagtagagttctagaatcccccagtgaggggctgggggcgtggctcagtggtagagcccctgcctagaatcccccagtgaggggcagggggtgtggctcagtggtagagcccctgcttagaatcccccagtgaggggctgggggcgtggctcagtggtggagcccctgcctagaatcccccagtgaggcatgactcagcagtatagtgtctgtctagcagttcctgagggcactgggttccagtggagtaccagtatttgggggctggggccttcttaattaaaagtaatgaaatggatgagccttaagttaaacatttctaaacaaaatcatttattcttaaaacaacaatccttaaagttatgctccaacacaaacactgtaaggaatgaagttatcaggagacaattctgacaagagtgtaaaagctctctctctcctcagtagttgaagaaacacatttgtagaagatgtgctctctcagtttctagggctagtgcagtaatgtagcagtttggactgtatagatccatgtggcacagctgcgtgtgctgatctcagtcaagactctcagcagttccctcccaatatgagccgtgcttggctccaggtatccactcccaagacccaagaccttcatcctcctctatccctccgtgtgtacagagccatatccccagcatagtccccagcttcctgcacccggcagagcacctcagctctagtttgcacactgagtagtctcttttgggtaacgctcacggtgctctcctcatgcttccgtgatggatgcagcaggctaattcctgggagggatagagaatatgagcatagtgctgtcatctgtcctgcacctggggagaacatggagctttccaccttctagcctccaaggaggaggctgacaccacccaggacaccagccagaccctggacatagcccactgctaagtcatgtgactggctacaaagtgacccaccctccatctgctcatccctctactctcctgttgcgatattgtctggcttccaccatgttctgttgagttgtgctagggaccaaatccatttagggcaagtaaacagaaataatgccactacgctttcgatttgggatgcttgtagctatatttaataatgcaaacacacacttggtcatgtggagtgagcccagcatggacacaggaaacaaggttagccttccaaggacttcagggagacctggagaaggaacccaagatagccattgagggctagagagcagggctgcctgtagcttaactaccgggacaattattaactgctcacagtgtctttaaggcaaaagcaaaggccatagttgttattaaaactgattgctgggtcagctgtggtggttcacacatatcattccagcactcaaggcgccaagttacgggatacctggagctacagcgtgaaatccttataaaataaaggggagaaaaggaaatagaaaaaggaatatcataatttttgaaagaagataaatggaataaaaagagccaaacagaagcccctgagcccagggtctcttttgtgtaagaaattagtacacatgaaatgagcagtgagcagaaggccacagcgaccatcgcacagatgtcgttaggacagttcttcagtgaccctgctcttgagccagcacactgaagagagccagaacagccgggaagaaagtagaactgttaatctgctcactaaggagcctttgaagcctaagccaagcctgttggtacaggctgtgaccacagctacttgggaggcagaaatggagagctcaagttgacgggcagccactgtctccctaagctgtacccctacaggagatgggacctggaaacagaagccttgggaagctcacagtccagccagcctgggtgctcactgaggagcagagaccttccctcagacagggtggaagtggacacagtaaaactggtcagctgaccttcacgaatgtattacggcatgtatgcatgtgcaggagcacatgctcataagtatcatacatgtacatctcacacactttttcatgtgtttgtatgtcacacatatcacatacatgtgtatacatacaaagttggcttttttttttttttttagttctcatgaagtttagctgccagctgagtcggctgtgagaggccctcccactttgatacctgaggtatcgcgtcagtcataaagtagtccccttctcactcacttctctgggtccagccagaacttcacaactcaagggccagtgtggaaaatagatcctgagctggaaccaaggaacagtgtcaggggattccccacagctggatgggactcgggagtggggctcctacagggagcatggcgcagagccctgccgtgtcaggcttcttgtcccaggtccggtagagctgaaagctattcatctagtgagcgtggccctggcagcacagtagagtgagcaagggcctagagctggagtgaaaggactgaagctatacctcaagttttgcctgaatccctggcctcctctcagctgctgcaaggactgtgccttatagtggagagctgccctgggcagggttctcagcgtagcctcctcttatagtggagagctgccctgggcagggttctcagcgtagcctcctcttttcagtgtctctgaagtgcagtccaggcctagccttgagacttgagtctcgggaagcccctccctcagccagtttctactctgtggacaccacctgggcttcatccagagccagggtgaccccagacctctatcagagcttatgctgggagccctgctcccatggtgtgccctccctcctccctctcctgctgactcacctcacccctgccctcctctgggtcctaggcaccttggagatggagccttatgcagatgctttagtcttgttctgttgtgttgttgttttgttttagagatgccaaggagcaaacccaaggctcacatagcactccactactgagccacatccctagactttgagtcttagcccaagttcccctcgnnnnnnnnnnnnnnnnnnnnnnnnnnnnnnnnnnnnnnnnnnnnnnnnnnnnnnnnnncacaaacacacaccagtctgctgaggctgctgagtaactgccggcattcccagctatgttgagctgctcggctcactgccttgtttcctttccttcctggcatgtctgtaaactttgctgggtagctgaagccaagtacccaattagggatctctctccagtttcattcagccgtaattgaagtgggagcatcttagtgcatgacacatcaaacaagcgtgcgtcctggaaccccagcctggatgtacatagtggccctgacctcccccacctgagacctgcagggccagactaggccaggaggtgttggcacagccagtgctcaccagtcaggtgggggcagggcccttcagcttggggtccccatgggaagtcatccaggtgtagcttggcagctaccacccacccgtagtttcctgtcttggagagagggtggcttgcacacctgcctgcctgggctgtcacagggctgactttagtagctagtctgtgttccttggctgtgacccatgcgctgtattctataccatggggaacataaccgtttggtatggggtccggctgacttggggctgctgtggggtctgtctaacttagttggcgtaagtacagggaaagtccccagctctcccaggagtctgccctgtctgtctcccctgtgtgtctcaccactcctgcagcagcaccctccatcctcggctgtctaagggagtaattagctcagtgatttagtgagcttacagcggtattctgcctccacgacagcctgcctggtgatagaatgttcccatcaccctgatgggtccccaatgcccttgcagtggtcaactcccactcacagccccaggcagtcactgatctttcctctgccgatttgtcttctcagaacattggtctaaatggaccctacactacataggcctttgttctagcttctgtccctaagcagaatactgtggaggttcaaccgtgtcatagcatggatccatattcctttttatggctgagtaatattccaccacgtggacaacccatgtgtttagggatcaagtcattgatgatggacattgggctgtgtccacctgaggccactgtgggtcatgctactatggacattggagatagtgcccatgtcttatatgtagaaggggatttctggattatctgatacatgtatcacctttgtaagaaatgacctaattgttttccaaagtggttgtgcctgctgacatccctttgagggtcccctgtgcgctcgtcacactcctgcaattcgtctttcctggtttctggacgacaacatcctctgtggttgcatttccctaatgactaatgattcggagctcatttctgcagcttattagccattcatacatcttcctcactgagacgcctctcacatcggtgcccagtttttaattggattgtttgtcttctaatcattttcttaatgctttcgtctgataagcagcgtttttaattttgatgaagtgtaatttatcagctcttccttctgtggcaggcactttgtcctggggactccattcactatggttgcctgtgattgttacagaagggctcggctttagaccctgtgccttgccctgttagattgataatggaatccagtttcatttgtcctctttgatcctcagtcaccccagcacaataggctgcaagacgggccctgttggcttgctttctgttgctgtgataagcaccatgaccacagcagttcaggaaggacaggcttggttcggcttccgtgtccttctcatagcccacaggtacgtcaggccaggagcagaggctgtcgaggggcactgctcacttgccttctccccacggctcgctcagcctgctttcctatgggacccacgcctgcacacccagggatgactatacaacagtgacctgggccctctcacatcaatcagtagtagaaaacatgcctcacaggtttgtcatctgatgagggcattttcttcataatgtttcctgcttttcaggttgacacaagcctaactagcatacttgccttccccaatcccagcactctggaggtggaggcaggggattagaggatttttagtttatccttggctaccaagttgtatagaggctaccctgagttacaacagcagaatagctgcattactgtgactctgaagatcagcttatgatgtggcctctagtccacaatcactctgtcttgatgggtatatttggtcaactctccacaggccagccagtcctagaacctcatcccttgtcacacttgaagcagaggccatgcgtcctccagtctcttctggggatcgcatgccctttcatatgcttttctttctttttcttctttttctttttttgagacagggtttctctgtgtagccctggctgtcctggaactcactctgtagaccaggctggcctcaaactcagaaatcctcctgcctctgcctcccaagtgctgggattaaaggcgtgtgccaccaccgccaggctcatgtgctttttctaagtcagctgccctgtccttgcacctttgtaaacaggtgtgttgtgtgattggggcgggggggtctatttctattcacctcaaatttaggtggccgtgacagaccaaagaaataattgtatccaagcccagcttggtgacccagtgagtttattggggtcccttacagggttgtttataatgggtgatgcattactcacaggcatgcggatgagtccagcagccgtgtcatggcccatccagcctgctaatgacgtttgtatgctgggttcctggaatggccagcataaagagtctccttccccagcaactgtttaccatgtctgtgaccttggggagaggagggccattgagccttctcccttcacatgggaatatagatctgagagcctcctgaggcttatcacagtccatctgacttcaagccgccaggaccttgtctcacctcctggcccactgtaacacacgctttctggccaaccttcaggtttccgaatctcagggctctttgtcctccttgttccaagtcacactgcaaagttgattatcagtagtgagtaataggcatgccagtctgaaggccatgctgccttgagatttcccaccagatactactttgaacactttctgccatggtacagcaagatggggtggagcggccatgacacacagatctggcagccctagcaagacacctggggcatggggctcctgccctccttgcccactgtgacagttggggtgcaatgtgtgttgtctctataaaggaccaggggttcttgttaaagtgctgagaactggacaggcttcagggaaacagtgggatcgagggccgggggaaggcagggagatggtttagctggtaaagctcttgtcttgccagcatgaggtcagtcctcacaacccatatctaaacataagtgcgcagtgccctgagcttaagatcccagctttgcaaaggtggagacgtgtggatccttagggctccctgaacagccaccaccctactcgatggctccaatgtttttaacattatgacgtacattttaatttattttgtgtatctggctgtgtgtgagtgtagtgcgtgtggatgttatgggacagctttcacgagtcagttttctctttctgtcttgcaagccctaggaaactaacacagatcaaagtgaacagctgagaaccaccactcagggttgttcttgacctgcaggaaggcatacacaggcacatgcatgtgcatgctcgcgcgcgtgcacgcgcgtgcgcacacacacacacacacacacacacacacttatgcatgcacatatatactcacgtgtatgcatacaattatgtacacatgtgtgcacacacaggcacacacacatgcttatacatgcacaaacactcatgtgcatgcacatactttcgcatacgtgtacacacagggggcaggggataccacacctgccctgtctaatagagtccaggcaaccttgactcagccccagcagctctggctgtgtttagtcatcagcttgttataagaatcatgctgtcacaggcccagctacaagccccatctggactccaggccatggggagcagggctgcctttgatgactctctttgaaagctaagcatttctgtactcaatgaactcagccagtccccgtcccctcctccaagctagtatgtggcaggaagacaggtatccccagctcctttctgcttacctggggcttctccatggtctaaccatggtctttctcttgctgtgcctggttcctcagcacccagtgtctacaccacacccagcatctgctccaccccagcgtccttcccaaaccttctctgcactgctctggctgctgagttggttctgtagccttttccttaatctgctgtctgaagaattggttccatatcaagtctgaggccatggcacgcattagcaggtttttaatacactgctatatctcgaggaggagggacaaaggagatttaaaactcttgtctcgccaagagcagacagattgactcaagactgacttggtcaataaaagatgagctctaaacactgtcccccccacaagggagcttgccttccagggaattatggtttctgtacacccagtgtcagaaattaataatacatccagtgtgcagaacggattgccagctctcagcctatgtagacgtgacttcaacactgtggctctgctgtgactcgtcctcgctgcctctgctctctggctccatcagagtttctgttctatctagtggatggcagaccactgcctatgtccaatcttctcttggcagatcacctgcctggtacatctgtagaaggaagcttctggaagtttgtactgaagcagctctattctcttgtttgtgacatgattctctgcttcaagtgttttgggctgggcagggaagaggtatgtgtatgcacacatgatgaggttatgcctattggtctctgattgtctctgtgtgtgaaccctctctttgaaagctgtggctctcctagaggacataaataggttttgtgtgtgtgtgtgtgtgtgtgtgtgtgtgtgtgtgagtgtgnnnnnnnnnnnnnnnnnnnnnnnnnnnnnnnnnnnnnnnnnnnnnnnnnnnnnnnnnnnnnnnnnnnnnnnnnnnnnnnnnnnnnnnnnnnnnnnnnnnnnnnnnnnnnnnnnnnnnnnnnnnnnnnnnnnnnnnnnnnnnnnnnnnnnnnnnnnnnnnnnnnnnnnnnnnnnnnnnnnnnnnnnnnnnnnnnnnnnnnnnnnnnnnnnnnnnnnnnnnnnnnnnnnnnnnnnnnnnnnnnnnnnnnnnnnnnnnnnnnnnnnnnnnnnnnnnnnnnnnnnnnnnnnnnnnnnnnnnnnnnnnnnnnnnnnnnnnnnnnnnnnnnnnnnnnnnnnnnnnnnnnnnnnnnnnnnnnnnnnnnnnnnncccccactatccagcctgttgggaataagaatgagtgagtgagtctaagcaaggcatagactgagtctcgtccttagctcagtagcagcatacaagcccataggctgttggtttggattctgtagcctctgatctagcactcagagccttcatttcagtcctgccagaggcaagcagcacaagagctctgcctaccagtattgctgaagcaacagctgccccttctcctgaggtcacaatgacaaactgaggcacagttccactaaggtacactccggaaacccaataagtttattgggctttctttcagagattaggttaggggctacttacaggagtacatgtgcttatttctgaacaccactctgaaaagccatacccatcagggatgagagcttcctcttagccacatcaatggatccctccctccccttgtttttccatcctatatattctagctcagtagttctcaaactttctaatactgtgaccctttaatacagttcctcatgctgtggtgacctcccccaaccttaagattactttgttgttacttcataactaattttactactactactatgaattataaatatctgatatgcaggttcagagcagctgtgctagtccctccctgagttcaagtgcaattaaggcacagttgcctgtaacaggtggcagggtccatggtggggtattaacagtcaacaggcccagctgggccggtccatttgcaagggggcagagctgaacttcccaggatggtagttactgagcttagaggacagtcactcacagcagccaggctgatggagctccattcttgccagtgctgtcaatcttctgtcatcaaaattggcctcacggccaatggcttttctctgggtccccaaaccttctgcctatcttggattgggaatgacaacccccaaactgtagcgtgaatgcagttgtgacctcttagaaatgcccagctgagaccagtggagaggggtcatcagctccgggagctgggagcacagccttgatgaatgctcccatggctgatagagtcaccacatgcaaggcaggacttgcaggagcctgcagtgccctttcaccccagggatggattccttggggctgcttccatctgaccctcggtgttaccttaactgtggcatgcctttggcccatccccactctcctttcttacatctgttgccaccttccctgccagagcttcccaatgcagaattcctaaagggaaatgtggcctttagccagccaaggtaggaccccggccattgggatggctgccgttgggtaagacgccagcttgtgatccagtggtctgtcaaagaggctcacatgctgccaacagtggctgtgggtggaaaataatcctggtgcagtgctgactggcatctcatactctgtgaagtgtctcaccctctgcaatgcatctcgcaccctgcagagctttccagcagtgggccagcgggcatgagcacctgcagccagccaggccttgctctacagtgtttctcccttttttgtttgttattttttgggagtctttttttttgttgttgtttagttggtggattggtttggtttggtttttttcctttgagacaggatctcatgtaatctaggctggccttgaacttctgagctttctgtttctacctcccaggtgctgattaataggtgtgcactaacatgtctggtttatactgtgctggggattaatcccaggacttcatgtacgctaggcaagtgctctaccaactaagccacatcctcagcctttctctctgtaccttctaatgacctgtgtttccaaggctacccagtcttggttttccagtcttctatagcaatgcatactagagaccttcaagtggggtcataggttgcttcaagtcacccagccccagtgtctaaggagaatttggacccatctgctcatttagtcctgctgagtttcaatggctgtgtgtcctgggcattgtggatgctgggcttgccccaaggggagccagtctctgcctccagggacttgtacagtggtggaagtggactctcatccagacagggttcacaggaccctcaaagcagggcagcaccagaggtacagaaactcaagggaggtctggaaggaggacaccaggtggttttagcgcttgtcccagaagtatatatagtaccaagcacagttccctgtgggaggcagaagtccagggcctcttgtagcatggcagagaaccatactgcccaggcatgggtgggtgaacctgatgcacacagcagtgttggaagccaagccagcacttaggctgggtttccacaccagtggacagaagggaaatcctgtcttacccctacctcctgcaggatctaagcagggctagtccatgtcagtggtgatgggaagaggtcaagcatctgattggggccctctgggtcagttctgggtctacagcagtccccggaacggcggctgcagaggtgggtagcaagttgacaagggctacaacttagagcagcttcggttactcacagtagtggtggtcttgggtgggagctttccattcacatgtcccggatggggtggtgagggaggcctgttgagtggtgttcagaggcaaccagagactgcagattgaggagcactgacaccaaaaccacggtcctgttccagatggggttgcatgcagcttgatgcccaacccctggcccttattttcctgagccagtagtaatgcagaagtgtgcatgactcttgcttgtcactcactgaaagggcctctgctgggcacctcaggcttgtgccacagggcagaggcctactctgggaagcattgatgttggggaggaagggctgactcaacagctaaagctgtgaagtcagcagcaggagacatgcaggcccatgtagcttcagcccactggccagtggtccaagggtctttctgagctgaggcctgggttgctgatggaagctcctgttcaagcaccagggcggggcctgcagtagtatctccttgcacccagtaggtgtttgtgggtatccctccggcctccggcctactatgatcctgaagacccgggttgggtgaagtcagtcctctgtgcctctggcttgtctctgcatccatcatccagggccgtgtccctcttaccctggaggacatgcaaaatcaggggctgctgattctctactgccaagattactgccacagggactgtgcagcctggtgctctagggcctctcttgctctgtccctggggtgggggagggagtcttacaagaacgaatatgatatcagcgcccgcttgtcaccccgggactctcccaccctgtaatctggtgggctgtaattgccggtgtcttttcaaatcatttttgtgcaaggtgacaagctgcttgctggagtgagcagttaatcacacagagatgccccgtttgaaaggcgctcagagcttacccaggggcggctgccagcagccaggcgggtgcgcatgagctgctcatctgcatataattccagggcgagcaagcatcactgaggctggtgtaaaccatgcaatttccggcccagcaggggaatgcaggctgggggtggggaccaaatctcttggctcatggcattggtggagttaatagtaaccccatctccatagggcagcaggagatctgattagtgggttttaatggcctcccactttgggaaccacagcccctcatcttagaccagcagccctacctgtcactctccagggtaagtttagggaagaaggtcctagctgggactgcacatcacctgtcagccactctactggctggcttgttgtggtttggatttggggtgggctagtagtctcagtgctctgtgccacacccactggctactccacttccttctgtgtggtgtccccgagggttgaacccatagtggcccagcaggccctgggtcagtgctgtgggactcctcctgccatcctctccaggcagccacagggagtagggcacagacacccttgtcacagccacagcagtgcctggcctccacagctgctaataaaattgcataaatattttatggctaattattaaatatttaaaaatgtaaaactgggatggtttggaagttagcaaggcatgaataattcagtccttagatgcacatcagctttgggtctgaacagggccagcacctccagtacctgcagcagctgggggcataagtctcagggatttctctggctagccaccagtcccccaggcctagaagccgatactcaagcagggtccctgttatcacattgcaggataggtctcaaccccttcccttgtaaaatgaggagggggttcatgtcgcctgagccgtggccaagcagataaaatccctttatcttggtgagtcagtgttcatgcctctgcagagactaaaagccaagtattgtcctgccacctgatcagacaagaaagtccaaccatgccatcgacccctggatccctccaaggggagacgaggagtagactactaagcacggccaaagcatcaagaaagcctagagcatggctctctgtctgtgggttaatccttcaggctgggcttgttggaagcagcacctctgcctcaggtttgaaggccacagttgtgctagctgtgatgcgtgatatcctagtaccgtggtggttttagcaaggcctgaaaatcccagtggattctgtttacttttcagaagggaaaatggctttcctaagaatccctaaagtaatgttcaaaactctacttctagctcttaatcaggagatgctggggacattgaggtagtcactgctccactggaccacaccatcctgtcttctcctaccccatagcattatagccaggaagggagagcccatctgcaaagatgggaagcagagaggaaggccacatagtcatgggcatccctggtgaccacagtaaaggtagcatgcatgtttcctgctggcctatatgtgagcatgtttcctttccagggtgttagagagcttggctgtatttccttctagcatgctcacactcaagtgtaggttattgtcatgtgagtgtcagtgtggtaacatactgtctctctgtttctttgccataacacccagacgtgtactgccatgcctagcccccccactgtggttgttggaaagagaacagccttcataggttcacatatttaaacgtttggtttccagttagtggaactgtttgagaaacattaggaagtatagccttgttggaggaggtgtgtcactagggtggccttgaaagagtgatagacctcctttgacgtgtcaagaaaggcccaggctctttctctgccttcctctggtggatcagaagcaagctcttagctactactctagtgccatccctgcctgcctgtgaccatatttcccaccttgatgatcatgcacaccctctaagactgtaagcaagccctcagttaaatacttcatgagttgccttggtcatggtgtcttctcacagcaatagaacagtaaccaagacatgtgctttcttgctgcgtggcttcttagcagagagaaagactcttcctccagtaagagtatgctctggtatgtggatacacacatgcacacacacacacacacacacacacacacacacacttctctacattcagctctgatgggacccatgttcagttggtgctcttctgacctgggtacttaagcacacacatcctcatcttgcctcggtgtcattgaggtaagccactatctttgtaccatgttctttcacatgtttggttttccgtgctgcccgacatgctgactcctcctgggaccctctgcagggcctgtcggtgtcatctcagtggttagaggtgcagtgggctctgcttggattcttatccttggctagtgcgcctgggatgagaacagggtgctcgtctctgataggggtcatgtgggctcttgctgcaaccacaggtacctgccctgatagtccccactgctatgcagatgcttcctccccagccctttctcttgttctctcattatgtctcttgcctgagccaagaaggtccagtgctctaagatgctgttgtttgccactcactggagttgggtataccattcagacagggctctggaaggcctatctcccatgctataactagaaaccagagctttgcaaaacctgtaagttccttaagaacttgccatggtgaggtttttggttttggttttttttggcttttggtttttggttttggttttgaaacagcattccatgtagcctaggcttgtcagaactcattatggagccaagaatgactttaacttctgatcctcctgcccctgcctcccatatgctgagattataggcatgtcctgctatgtatggctggggatcaaacccagggcctctagttgagccgtatcaccagcccgtcagtagttttctttggaggtcatgtgtttctctccccaaagagaaaagaattaggcttttctttgtcctgcagagctgaccccaggttctccatcagagtcatgacagatgtcataggggctgccactgttgtgacccagagctacagcagtctggtgcaggtgagcatgagggtttaagactggtagagtctggtctggtttgaatccctgctgctgggacaaaatgctgccttaaaacaactagggagcatgggggaagtgttcattggcttacaggttgtagtctgtcactgagaggtactgagtcaggaacttgacatcaagacctgaagcagacaggaaggcttcacattagtttgttctctgggcttgctcagcttccttgcttatgtatcccaggaccaccttttcctgatggcactgcccatagttagctaaccctacctacctgtcttagcagttaagacagcactccatcgacaggcacataggccagcctgaaggagacagtttctcaattgaggttctttcttccaaggtttgtgtaaatttacaaaaactaaacagcctagggattagagaaacagctcgttgggtcagagcacacactgctctcccagagaacctgagttcagttcctagcactcacccacattagacaacttataaccactccaccttcaggggcaatctgatgcctctggtctctgagggtacctgcattcacatgcacatacccacactaggatatagacacacatatacataatttaaaataaaaaaataaatctaaataaagaacacaccaggcacccacctttctgtccacagactggcacaggtggtgtgcttacagtgagccctacagccatcttctccctggatacctcttctctgtatctacctcgcatgtgcccctctggccccactagtatcagccatcctgcagacttgagggcaggagatctgagccatagacgctcattaccccaacatctctgctcttgggcaggagtgcatcaccactagtttctacctggcagagcataggctatttttgccctgtgtccttccctcagaacttgcgcagatgcctcctgtgagtccaaaagggggctgagatggtgagggtgtcagctcagaaacatcctgttgcctccctagaaccctggaaccagccaacaggccaggatgagctttccacacagacatggaacagagagcaggggtttgaggcaaggcctcaggtgcccgggaccactctggaaaccccctctggcccatcacagtctctgccaccaagtctggcttgagttctaatgaacaattacatcctttccctggctcccaattgtcacctgccatactgctgtccttataggacatccaggactgtccttgcagagagagccataggaagggagggatggacagccttggctggggatactgaggagtgtggttcagagctggaggatcgcagcaaccatagctgcttcctgtgacaagatggaggggcagccagagagagcttcaaggatctcagttgccaggagctagaatgaggccagggggtggccctatagatctacagaaggactccagagcaaagctgccctcctctgggccttggtctcagaatacgctcagagcctcttggtggcttgcagcttcctgggtttcaccacatctaccaccctggccctcactcctgtgttgttacctgcatgctcatgagtggctaaggacgtctccccaatgccagagtatgttatcacagacccccaaggccctttgcctcctgggagaaggccaaaagcaacctctgctcttggtcactttgaaagagactgagtgacagcctgtgacagaagagtaatgacacttccaaggtggaacccatcttttatttatttaatccaaaccatcgagtgaattattcattcttgtttatgtaagccactgagccacagaagtaacaaggaagttgaagcatcccaaatcaaatgattgtttccaggccttgggcatcaccccttgctggtctgtctgcccctcccaacaatggcctcactcttgtcatgaaagaggtgtcttccactcccagccgccaagggcaatgggcgttccttctttgtagccacaaccatgcctgtgattgcttggcatgtggccagggtgactcctctccattcatccccatgaagtacacagacctcctccccaggggccttccctgggccttcgctccacacctacctgcctctgagatcggaattacacaaaagcctgttaccttcctcaaggtcagcctgcatttggtcccaagatttaatcgaccccattggacatctgaggtctttgagcagttgtcacagtctctaatggctgaaacatccttgggaagtgtggtcagtgaatttcttctcctgatgaaggccctctctcagggaggaggggcccagggatgccaggaagagtcttgaggttagggctgccaattaacctttcattttcatagtctcatcactcgattaatcaaacttctgggcctgtgtcctgttgaagggactcacactgtggagaacagtgtctgccaaggcctctgtggggtgatggatgaaagagccacaggacagggccagtggccaggcaacagccccgcagaagagcctctgccttcaggctgggtctgtcgagccatttctcctcacagccactggtaccagcatgccttgctcaaagtgtgatttcctccctagactgtgggtgggctgtccattgtagaatatgaggggtggcaaaggtagcagctgccctgctggagcgcttcatcagtgtgggtccagtgcttgtactctttgagtttcagtttccttgtttataaaagggggtggggaaatgttcatctggaggtgtgcatgtatgaattttcctgggaaaaaaatctgttcattctagatagggcaccaacaacagagcagtctgcccaagtctaggttaatgaagcagtgaatttattggggttacatacaggggcctgagtgagcagttgcttactgaagcactgacgactctaaggagctgcgtcaccaaaaagcccaccccagcacaggtaacagctcggcaaagctgcatcctgaaagctcccaggaaactcgaaggccactcggccagttggagagtctcctttccagagcagttgctgttacccgagaaccatggcctgggggtgatgtggtttttgagacttaggctggtctccagggctctccctagctagatcctcaaggctggatctgagggcagccacatgctatgctcccctgggagatggtgtggagacacagaagtggcagagtaaatggggacccagtcttctctggtccccgttttcttccagattgctcaaagcttcttgtccccacatggctctcataggaagcagtctctggccccactgatccctagaaagccatcccatctgcgcgtgctaatcatcctctggggctgtggtgcacaggacacagcctcatcctccttcctgcctcaggcctgacctcaaaccctttctctgctcctctttgacggtgagccagcccatgaggacctgggacgggccccgtccatggagccccttggactcaagtttctctgacttagggatatctttgccacacaagcccaggaccaccctcctcaaaagtgcccgcatatcatggctgatgttaagtaaccccagttcctcatcacagcgagggagaggtcttcagggcccaggcttgcggggctctccttgtgagaaagttccacgaaggactttcaggaagtgcccagcttgagacagcccctccctgtgtgtaagtggagccggctcagtaatgaacggggtgtaaatcagggcttaattactcagtaggcaccttgggtgagagattcatggtaattgtgtgtgctcctggtggctttacgcagctggcttctccctaagcaccagtaaaccatggcgggcaattggggaggtggtgctctgccctgaatgatattcccagagatatgtggaaagttggggaggggctcctaggcctggttatctggagcccacccagtccttgctgagggacaaggagggtccttttggttacaggtggccagcatgtggatcctatacctaacagtctacaatatccaaacagcctctcttccatctacctctgtctgtctctgtctctgtctctgtctctgtctctgtctctctctctctctctctctctctctctctctctctctctctgtcctgtgctagctcattcagggcaagtggccagtccctggaaggaaggagctgaggctgcagcctagtgattgtctgtgtgcccagagcagttgggactctgaccctcactgcagaactggactcctagtgcttccttctcctgcaggctctagaacctactgcccagctgggaccagttccccacccctacccccaaagcatgaccctgtagtgctttccaacagtaatggagggtggtgtcattctactagcagggtatctaatcacagcatctatctctcagagtcactgttgttttttgttttgttttgttttaagtactgttgttaatataatcagtttattatggctcccaccagagggtcacactgcttctctggcctcttgtcctttttcttcttattcctcagggctcacagatagatggacaccagcctcaggcatcggcaggcagcaggaactccagttaggccatagttcatccttgcttgttccccctggccattctccctgtcccaccagtgcagcatgggacccacactgtgcccttctccctgcagagctgcggaagcaggtggaaagtgctgagctgaagaaccagcggctgaaggaggttttccagaccaagatccaggagttccgcaaagtttgctacacgctgaccggctaccagattgacgtgaccacggagagccaataccgcctcacctcccgatacgctgagcaccagacggactgcctcatcttcaaggtaggcagcactgtgtgtgtgcatcaagccagctcattcagccacaggcagctcagctcgcctcctcattaggaagaaggtcagtgctggccttggtaaatgagtcatgtgctgagcagccccatgttcacatagcatggtcttcagtggcaggaggggacacactggccccttcctccccactcctgacagtcactcatctctggccacttgggtttttttactttatactctgtgagtctctgccaaggtcctccctatgagttgtggcactgtgactttgtccagaggtagtaggtgcccagaggggtgaggggcatggcaggcatcttgctgccagacctctgccaagtggcacagcccatggaagggaaaggacaagctgtatgtgccagctccttggtggtcaggccaaaggtaccaaagctggagctataagtagctgggcaaggccttcgagctggggaggatcagtggtcttcaggaagcatgtacctgttggagtctcatagccagtgtgctctaaagaggggtccctcttaactgaagcaagatcatcccagcctgagggagggtgcttggaatgtggctaggccagacatgtgtacaagttctcagagtgcccaggtccaacagaagtgaagttgttcctcaatgggagagggatggcattgtaactgaaaatctgggattacaagggcttacccatcactggcagcaaccttacttcctgtctgtgacatggccttatagtactagcatggcacatggccctagagtggcctgtgatcccagtgtcgtgtgtgacaggggaagagactctggttaataactgtggctgggaagcacagaggttggccagctccactctgcaccatgtgtatctgggccacacacaacctcagcagccaggctgtctctgccctgcagaaacaggaacctgtctatctaaacactgtacccagtgtgacctacatgttttatgcagaatttcacagaaaaaaacagtcctggcccagaggttttcgctgtacagtgactcacttattcttgttcccatccgtctgtctgcctggcccctttcatgggacactgcccatcgtggtgccatcagacacagcacctactgttccttgcaactttgtggtgtgtcttggagactttctggacttctcaaattacatccctccatttttacacttcttagcactctcaaacctttgactaagtaaataaatatttgaacgcccaaagtctttaagtcagtaagctatcaggaatgtatttctttgcttctgtgtacctttgaataactcaggatcactgatgggtatttaatttaatgcagtgtaggaattctgtgtgattttttttaaaagattggtaaatgaagatgtgctgagcagctgtcacaatgaacacatcacttacatccctgtgtagacaagatctaatttgcattccaaagtattctagggtttttgttgttttgtcttttggtggtaagggaatggaacctatggcctcctgcatgctagggaggcaagcactccagtctgagcaacactcccagcctttgcggaggcctatgcagcactgccactgaactacacccccagttctctttgtactttgtatttagagacagggacttactgcccacatgagccttgaaccctatcttgtagccttagacttgtaatcctcctgccgtggtgtgcacaaccagtttcaggccaggctattcaaggttacacagtgagaacctcactctaaaaagcttaagtcgcttctgttctggtctccaaaaggcaaacacagtcaccacagtgctgctttgaccccatcaccctattccaccgagttccagtctactcagaagttctgcccaccttctttctgtcactagcccacttatagagacctcctagctgtctatgagacctagcacagcctctattgcacacaatagagtgagggcaagaatagctgcttactgtagctggtacacactgttctcaccctctcccagttcctcacttcccatagaggcggatgaggtgttcctgcccaccaactgtccttggggttgcctagccaaccatgcacacacacagtcaccattctccaggtgtcagtgggtcagacccaaggggcactcagtgacactaacccagataggcaggaaaagcaggcaactgctttcaactcagggctcagaaacaggccagctttccctgactccaggcaggagggacaaggaggagccccgtgtggtctgctgatggatacttcccccagccaatgtggtttgagcctctcctgggctcctggcgataacacccagggctcaaaaccccctcaacctcaaagtggccagtgtagccgcagcagggcctcctcccccaacttctggcatcagacaggctagacatgtgtgcctatgctgggacactgtggaatggcttggtgaaagctgtgctaagtggtggccagagaagagctggcgtgttgctgtggtcacccttgtcacatggtggccaaacaagtgaagaacttggtatgtggtgatgtattgaaggggctgcatcctgtgacgttggtagagttgggtggtggctcatattgtagagagagaagacagttgtatcatgactctctgggcagtcctgggtgtgtaaactctgacttgtactgtggtttctttgtaagaatgcatgttcatgagcacatgtgtacatctgtgtgtgtagggtggagacagaggacactgccacctgttcctcactaggcacaccatctatctttgagaccgtctctcactggcctggaacttgctaagatggctagctagtgctagcccggggctgtctttttttcctcctccctggcctggggttgcaagtgtgccaccatgtctggcttttcctcatggatctgggtgcttgtaaggcaagcactttccctgagggactgtctccctccttgtagggggcatctgtctctccacagcagggtctgaagcagcctctagagtcacccgtttgccccactcaggttcttgtggcccacccctctgcaccaaggacaatgagccttgcaggcagctcagcgagaccaggaaatgtttcttgtaggctttggctacagttttctccaaagcctccccttggctagctgtagcaaccatggcttcagcctgcccttctgactcactccctcctcttacctggccctgtccaatcgggagagttctgttccatggccccatgctatccagctgtggaaggaagtgagtgcaggaactcagtgctagacacacgctggtcctcagagcactgcagtatgagctggttctaaccagctgtctgcctttatgtcatctgctttcctcatcagtcaaatgcagataattacaggttctgtgcaggtgtgggtcacttgagggaccttgttggtgactaagctgttacctacagatgctgccctcctgtgtgcagcctgtggtcttttttttttttccctgctgaccctggcagagcctttaaagcagttctccagcgttgtccacagtgggcaagctaggcaagcaagtctcaaagaggaagtggcaagaccccaggcacaccctttccttactcccaaccccacttactcccctagtagggaacatgggtgccccggcagcaaccttagagcatctctaggccattgggtcacctatgtcttctctccatggtaccaggtcccttcctagggttgaggcccttttgtgccattctggcctctggggcccacacagccctgagaaatccccctgtacaatgtagtaccagtaggaccacagtggatcttccaacaggaagtctctccccaagactcccatcccatcccatctttggtcattatataccctcataccctctataatactattagagctaaagcaattttataaccctcatccaccagccaatacctggctagcagatagggcactcacagatctattggaggttggtaagagaagaaggaaaatggatagggaccaggcaggaggcagggctggctcatacacaagtgtgtggccatggccagctcagtctcaggcaaggccactccatcccccagctcacataacttccgctcattttcttttcaccccaaacagcttctaggcaggaggggtctgtggcagagttagaaatagctggggcctgtttccagccaagcaggttctgcaaatgtgcgctgggataattgagggttggctcacggtcccacatggctctgcttcccttcccagcctggacccagcctctgccgtgtgtgggtggccgagctgcctcccaaggctgctgtgtgggggaaggcaggagctcagctccagcatacatcaggagtctggcatcttgcccactcctcctctcccaagagaagttggaccccagagtctccagtttccttggaaagactggacctggaaggagtggcctaccaaatgtccgcagcaattgtggtgtaatctcattccctgtggttcataaggactgctcagaaggtagtcagaaacaagaagccagacagcggccaatagaattgactgcatagctcttaagatacaggtgactctgaccttgggtccccttctctcatgcctctgaccactccacagtctagcatggctgggcccagctttttacatgggtgctgggatggaactcaggtcctcatgcagttttactccagacctgtctcttgtgttttccttttttctttacataatgtcccactgtagcccaggcaggccatgaccaagatcctcctgcctctgcctggacttctggtacggtcagtatccacagtataagcaccatccttttactagcacatcttgctaatcagaggcctgagccaaaggccatgctatggtgagggctttggaggcgcctcccaggtctctaggcaaatggctggactactcatagctgcctgttcctcccagcaatgctggttcaaggtgctgggtcatggtactgctgttgggatgtgtgttgtggcctctgcaccaccaatgggatgtctggctcagcctgcagtatgaccatgttgccccttactgtggttttgtctctgggcacagtgtgacatttgttgggatagaagctgcttgaactacctgcctcccaaaactgcagagctccaccatcccccagcaacctggcaccctacagtgggcacttcctaaactgtgtgcccagcctcaggataggcatatcactgtgattccgtctgccgagctcttgcggaagcacacagagcctacgctcatagcagaaagagcaggtgaggaggcagccagcttccacacacctgtacccacagtgccgggctgccaaagactgcaggtgtatgcacgggaaatgcaaatgtcccagagacccatacccagggcccttcagccatgcagcatatgactcctgctgggtgggctcaggagagcctgggtcagtttctccatccacaggatagctgtgcaaggaaaagaacttggagtctttttccttctgtttcctaagcatgcttcttggaggaagggatcatgtatctgccaaagcccagttaatacacacgtgattcatggactcatgggtgcccacccctatgtctacagcccagtctccaggagctcagctcagctgctgtggactggcataacaacacagtggctatgtttcaataaaactttatttatggcaccaagctccgaattttatagagtgtctacagtatgccaagtattcttggggcttcttgaaaactaatacatttatttgtagaatagcattaggtttatagagaagttgacagtaaaataagcttcccctgtgtcctagcctgtgccacagttttttatactgctatccaatcttgtctatgtatggcctggtggctgtagtctctaaacccaatctgtctagttgctgggaattgtgaagtctgtgctcattgaatgttctgtttgtgaaaatgcattaaaatctgtgccaccactctggtgtcccagagagtagctgctgtctctgaagtcttctgagtatctgtcatctccagctcctacagatctcctacccatagtgctgccattcttggaatgtcccaaaggcaggaccctctgtgtactggattctcacacttgagactcctctgggtcctttctgggctgtttttatttttgcagagatagagatacaacccagggctttgttcacatcaagccaaatgctctaaccttgacctacatctcgaagcccctcactaggggtttctgggcaggtactcagtgaaaccactgagtttcaagtccagcctttagagttttttgagatagaatgtcgctctgtggctcaggctggcctccagcttgccatcttctcccctcccttctcagtactaggtttacaccttgcctattcatttctttctattgctggtgttggtgtataccacaagtgctatgtccagtcacctactgaaggatgtcttctatgtccagttttgattcattatgaatgggctcctctacacagagctttaatgcactggcagcttgataatatacagtctctcgcagttctgttgatgcagaggccatagtctgccagtctctgacatctacgcatggagctgagttggggcctctctgcggagcagaaatggccctggggctactctcatctcctgctttggttcctgtcacacatacacacactcatgtacacatacacttggcctctgtctggtccactggtgcttcccatatggcacctgcttctcagaagtcagaagagcagggtcagaaagtggtggagatgacgtgggttccagtgggaactcatgcagctgagcatgtgcttcaaagctgggtgctatatgctcagtgtcagtgtttggagagtggctgatgagcaccagtgcccagtagttattgacaaccccacatcttcctcaatgaagtgtatatgggctgtgttagttaatttttctcattgctgcacagaatacctaacagaagcagcttaaggcaggaaggatttagttgggctcacagcttcaagtgatacagtttatcatggtagagtttatcattgtgctggggaggttctacccatagtgctaagagtgtgagatggcttctccccacatcttggtgggtcagggaagcagagagctcaggatggaatgagaattaggtatagccttcaaggtatgggtcagaagtagagcacttgcctagaatcccccagtgagggactgggttgtggctcagtggtagagcccctgcttagatcgccccagtgagggactggggtgtggctcagtggtagtagcctacaaccaccccatgccttaaatgttctataacctcccaagagagtgccaccagctggggaccaggtgttcaaacaaacaaacttgtggggagcatttcacattcagacactaacacagggtgatgctgggctggaagtaggaagagaccctcagtttacaagctttgattgttctccagcctcccacagctatgcttatcagtggtaaatacttcggtagcaaagttgctgggtgttgtgtgccaggcagtaactgggctagaggctgagttactttataacacactttcccatcacactttgctcaccagctgctgccctccaaggccttggaacagtgtatgtgcctggttccatgtggtgcagccccttagtgcctctctatatggggctgcaggttccttgactggataccattcttaccagccctgtgctcactgttccatgatgagagcaggctgggtgtctgtggccatggctcctgccaaagaggtgtaggctagccaggcaaaggcctgcatccagccagggtggtatatgggcatgggctgagatttgctcagggtttatcgctccctgatgaagctttcacatttccactgtagtgtagatgtgaccttcatagctgccttgcctctgccttttgaagcagccttgtaaacacacagagcaaatttgcctgcctgctatgcttcctccatccatcccacacagatcaggcatgacgccccaggttcccagggaggtacagttgctcatagaagaagctctgaaagtcttgttgtcttggccctaagtcaccccccaatgccctacaggaagcttagcctgtgaggtgttccaagtccactggggtaaggtgctacaggacagacagcgatggggagcagctccagttctcagagagcactgccttggcctggggccctgtgtggccatggctctgctattatatacctagggatagcatgtctacgctggcaggtagccctgccttcagctccttgtcatcaatggtcaggccacgggacaagtgataagaacaaagtaggggaaaccaggtagtgatcgacatgtgtcctttgtactactcaggagtcaggaagcggtccatccatcccagggcagcacattgtcaggcccacccacagccccacttcatggattagcccatatgtatccctcagcctcctgcagcttacactcacccagcctccacctggtgctcacacagtgggtgtgcactggatgggccaagtgccctgtccatcttcctccatagcatagcagggacaaaagctgtggaaggtactcaaagaacaaagagcctgagaaagggacaaagcaaccaccctcaacttcctggtgtgggcagagattaggcccaggttatgggcacccacaggacctcttgagagtttgttagaggcccttagtgtcatgcacaaaggaaagatcactactaccgggggcagcttgaaggtcctacctctgactcaggctaccacagccaagtccttatcctctatgttgctgtggctcccactatggtctgccccctccctctgtcttcctggctcccaccatgatcaaacctttgtctgctgccgtgactcccactgtggcacccactatagcccaccttctccacctcctctgctggctgtggctcaccccagccccagctgttctgtctcacagcgccttcctaagcaacagagcaagaggctgagtgaggaatcctgggctcaataagggacaccgagatttcatcctggggctgtccctagtagaacagccaacagcctaaagagcaaaagccgggaacacatggccttctttagctactggctgttattagtgctgctgtggaagtggcaatggtggcagagcagtgctatccacccagccagcctgccagcatgcacccagcttggcagatttctcacagcagtgcctgtgtcccggacactccagggtcacattctagccaagcattcctgcttctgccaggtcaccatagagctttctcaaatgtcaccagatctaaaagaacatcataagtggccaggattagagcagagttaggaacagggtgggccaatggggaagtgaaacccaaagatgggaagggtatgttttctgtctggtgggataaggagatagagccttgggcattgctggcagcagctgggacacagtggactctgacactgatggggttccactctagagagggtctccttgctcacccagaagctgccctccgtgcacatcagacttctatctctctaccctcctcctaccctctttgcattcataggatcatggaaacaatgggggtggagtgactgtctgatcactcacagctgtaggccagtggttcccaaccttcctaatgctgagaccctttaatacagttccttgtgttgtggtaacattcccccgaccccccgctataaaattatttttattgctacttcataactgtaattttgctactgttatgaatcataatataagtatctgtgttttccaaaggtcttaggtgacccctgtgaatgggtcatttgactcccaaggggtcacaatgcacagggcacaggccactgctgtaggccaccgtggagcccagaaagggagatttggaagagcagggaaaggagtgcaggatgaagcagacctctggatgtagctgtgtgccacaccctacttgtactgctctgggtttgcctgtgcccactttaggagctgggatttgcagccactgctttgggagctgtccctcccttggtgctgaagctggaatcaaaggtgaggtcctggccagttgaatgctatcccaggtaccaagcaccatgttggctactgctcccacccctggccccctaaagacgccactgctagaaggaacactgtctgaagagaggctgccatggaaggtttattctttctcagggcttgcagctttgtaccgatgtctctgtggtaactcagcttcctcactgctccactctgtgccacatgcgacctgaccttctgtgtaagcaagaagaagggccctctggtccctgtgcgggggcagttcagccaaaagtgggtgacaggcagctgtccaacaggccctgggagagacagagcattgggtagagaaggcagtccaccgctctcgccctccctctttcccccctgacaggcaatcaggcccattcacaggctcctgttggcagaggccggcttctggaggcttcctgtctgccaagataacaatgagatctagatagacactttaatttgaatttgcctttttgggtcccctgaatttcaaatggagttgttaagaacgcacgctgacttcaaaacctgcctcattccttcagttgagttggcattgcctaccaggctctgagatctcagtggtgcaggaggcagagtgccctgagaccccagcagcagacacatccactcttagggtggggctaggttcaagaacagttctgcaacagcaatcactaggtctgtttgaggaacagacctgtctggagctagttagtcctctgccagcagcacaggacaggaaggccagtgagcttggctgaaattgtacaggtgggcaaaggatgagttcatggtgcagtgagtgctaagccccatagcatacccacccaaaacagccgtcttcctccaaggtcaacagccatgacccaagatgtagcacagtagagaggaacaaactggttttggtagcagcagtttgtgcaaaggccctctagtcaaggaggctgtgcatccttagaactgaatcaaggcacctggggtgagccccaccccctgggtatgggttcatttcccaaaaccttggggatccattccaaagcttttaaagaacatcattggtgatgagatggggctgtccaaagatcttgggttagcctatgctcagattgcctctttcctagtgcggccatcgtctctgtatacataaatgccctgtagagactgaggcaggagaattgctgcaaactcaggtctagtctgagccgcatagttccagaccagccttagagaaagaccttgtttcatttaaaaatggacagggagctagggaaaagataacccagtcaaacctgagggcccaagttcagttcttagaacctatgttttattgcacatggttttattaccaacagcaaggaggcagagacaaagagatcgctggggttcactagccagccttgcctaatcagagccccaggtcccaggaagagagctgctctcaagaaacaaaatggatggctcctaaggaaagacatctgagatttcctctggccaccacatgcatatgcacacatgagggagcttggaagtctgtgacaaaagaggttgccagcccccagccccagagctggagttacaggccttgtgaggcctcacttaggtgccgggaactaaactctggtcctctggagagcagtaagctatctcctcagaccctgttagaactttgtaaagaggtggcctgtggtccagaagtagccctgtgctaatggtttgcagagcctgctctggacttgcagtatgcaaattaccagcctgggtccctataaatagcatcgcagcacttagcagatagaaagcagcagcctactgagtcttctcacttatgtgtaacttctgtcatgcctccatattattagtgtgctttggagaacccattatcttttgaatctctcttttcttcttcgttttttaatcttctgcatttaaatgcttcacaaacacctttcaagtgtgcacacatgctgacagtcccgcacctccctgggctgatctttgctgttatgcaggaagaccctcctaactgttgctcgtaggtgggtctgctagcagcccatcccctccctttgtccacagtgcctttatttcatcttcactcacactggatctgagaaccgattgacggtcttgttttcttttagcttcttgacttttttttttttctctcattttctgactcatgggttctgatgagaaatctgctcacagaaccttaccccagtccttgcacagattctggctcttcctgcagctggctttatggtttcttttgtgtttatcttgtttattgttagtctagctccttgagtttgtgcatttataattgagcaaattttgaagatttttaagccaagtgtggtggcacaggcctgtaatcatggctacatgggaagctgagtcagagggatataaggttggaggccatcttcaactccagagtgagttcagtgccagcctggggaacttagtaagtctttgtttcaaaataaaaagtaagaggctggggagatagctcagagatagagatgtttgcctccaagcctgatgaccagattctatcccctggatccacatgatgaagagatttgacctccacatgtacaccatggagcttgtgccagcccagtaaacaagtcagtaacgtcattttaaaaagtaagtggcgtgtgtgtgatacagtggtagacatttgcctaaaattctctagagaggggctggggatgtgactcagtaggacagcacctctgtagagtctaatagcaaggagttggggacccagctcaatgataaggggttcacctagcatgtgtgcagccctgggatccatttcagcagtaccaaaaaataatgagaagaaactgggggaattcaagtattcttcacacccctcttaactcctgcagcaccggctttagctctaggcagctttggctgctcggcttcagcatagtgctgctgagtcagcattctttcccacctgtcctcatacttcactctccatgtctctgatatgagctttgttggtgttgacctttccctctggaggggctgatctgctattaatctcactcagtagcatttttatttcaaatactgtttttcatgtttaaaggacctacctatatggttagagccaggcctggtggcgcaggcctgtaatccccaaacttagtagcctgagtcgggggaatccaaagttcaaggccagcctggactacttagcaagagctgccttggtactggggagatagctgccttagccagtcacattctcgggggactcccagaaactatggtttttaaaaagccaggcatagtaaagagccctttccatcccagtgctgggaaaacaaacaaccgtgggatccttgcagtttcctggtctgccagcccagcctgtgcagtaaagttccaggcccatgagagacaaaggtagggtggcacacacctgtaatcccagcacttggaaggcagaggcaggcgatctcttccaataccaacctggatctccacagttcagttattgctcataagattgaaaggcaagcacttgctggtttggttagaatttgttgggtggttctggggtcttattggctgctcttggtagagtctctgcaggccccatggagaccagagagcctgttctcaagtgttccatnnnnnnnnnnnnnnnnnnnnnnnnnnnnnnnnnnnnnnnnnnnnnnnnnnnnnnnnnnnnnnnnnnnnnnnnnnnnnnnnnnnnnnnnnnnnnnnnnnnnnnnnnnacccgccacaacccccccccccccgccctcccccccacacacacacacagccgaactgcttcccagagagattgagggaagaaagggctgcaccaggatgggagctgtggcaagcacccataagtgccatccccgactcaacctcctggctcagcttgtctctttttataaagtcatcagccctattaaatgctgcctctctctctggccacatttgcctccttaaaggacctgctcccaaccaccatcatgttggaggaaaggaattgctgtcagaatttcaggggatacagaatttcaggtaactccagccctgacctgttgcgtgttgcccatttgtacccctcagtgtctatccaggcagacattccctgtgtttaagagctgcatggtagatagcacagggattgctgtaaatgggattgtagcgtaacttcaagggccttcctgaaatgtccttttcttcacttggacttctggccgcactgcccactcaccacacatctgtgtctactgttctccacacaccttctctcttccgctttgcaaatctgctggaaggttctgaagggggagccatcagtgagcagccccagaggatagagtcagacccgcccgtggggcttatgcagctcatctgaccagcctgctgctgggagaactgtctcctgaccggcaggggacagttctttgttagtcagttggcccttgcctccctctgagctgggaaattctggaggtggatgatagaggccgtggcttctctggaggacccagaatgttaggggagctgcttgccagtgtgagtgggacaaaggtagggcctcagactgacaggacacagcctggacgactggataccggttactgtggcctgatagccatactcaaacccggtcctcaggctgctgggccctgtcctcagtggccgtaccacacctctgcctgccctccaccacacctctgcctgccctccaccacacctctgcctgccctccaccacacctctgcctgccctccaccacacctctgccttccctgctgcaactgtccagtgctctcaggttcaggcagaaggctccaactgaagagtgagcaactagcatcccaccagatatttttccttcctgggtaaatttccagcccaccaggcaatcagcaacaggccactggtgcaggtgacatcagtctgtgaaagtagcttggtacccttcttcttaagggagatatactccaccacagccctctgcaccatgccctgtgactcttggggtctagggcttccatctcctcctcccccatcttgtcacccagtacagccctttgtacgtgttgtttggtgccctgaccttagccatgtggtagtgccattgtgtgtacactccagtgaaatggtatcctctgctctgttctccagcaccatcctcagccaaacccatttgcaccctaagctcgcagttcttgagccttctcttccccagccactgtgtgagcagcaagctctcccctctatcacactactgatatcctgactatcagcaaagtgtcaccctcctatgggtgttcggaggccaagccccaaggccagcctcaccacctggaccatcctagctgaaagctgaaagctcagccaccagcaaggatttgggactcaaagtgggccctcccgacccctaacatgtctgccctgctgggctctgaggcctccactgaaggtacctggatatacttccaaggttgcagtttgtagcttcattagttctaaaggacagcagaggtctctgaacctggggaagaacaggggctgggttcccatgtagggcagggacactgcagatgtcagccagagcctgccttccttccttccttccttccttccttccttccttccttccttccttccttccttccttccttggagacccttccagtgctgctacatctgggccctagtggcgcccaggccactacagtccctgaagaaagccaaggaattttaaaaacagctgggttttgggctatagacacccttgctggcctgagcaaggatgcaggagacagacagctccgtccccaactctgtcatggtgcttctggtggctctgggaaaggctggtaaaccaactcctgtgctgttgccttcatttctcatgtctgccccaggctgaccacagactttttaatccccctgcttcagtccctgagtgcttggattccaggtgtactcctgtttactccctgtcaaaacagtgagttagcaagtatggtggctcagccagccccagcacagagcaagagcctgtctccaaagaaaaatgcaaagaagcaataccctgctgcttcagtacaaataatggcatgtttgtgcctaagtttcttttctgttgttataatcaaatacccttgacttaaggttgagaatggttgttaccactcatagttcaagggtgcatataatgatggggaagtcaagacagcagctggtctcagtgcaaaccacacagcaggaagcagagagaggtgaaccccgtgcttctctgtcctttctccacttatacagtccaggatcacagccaggtgatggtgtcgcccatggtaggtaagtaggtcttcccacctctaggcaatcaaaaagatccaacagacattggagcccacagttttggttccctggtgattctagactctgtcaggttgacagcactaaccacctcagttagtaactggttcaataatatacgaaagttgaaagaataattccagccaagacacaaatgctggttggtaggagaagacccatgttttggctttgtacttggagtatgatgatcagggactgctcacatcatagagcctgtggtagaaggtgctgaatggaacctgtgaaggggtctcaacagcaagtcttcagtagttccaagtgtagatctccttatcaaagtaaaagtttgaactatggctatagctcagtgatagaaccccctgcctatcttgctgtcttgaataactcatggaaagttgggcaagcaggcagtcccaaagagatggtatagcagcttccctgttgaggggctgggcctggagaactcagacttctctgttgtttcccacaacctgcccagaagtgctgtttgggtttctgtctgtattcttatcctgccctcctcctcaggaggacatttccccctcagccccctccagatatctctctttctgtctctctctctgtctcttcctctctctctctctctctctctctctctctctctctctctctctctctctctctctctctctctctctctcacacacacacacacacacacacacacacacaccccagcagcagcagatgttactccaaactctttgccaatggattgtgaccctctcctaactagtgtaaaccaaagacaggtgtccaggtgtccaggtgggcctcaagctttaataccagaacccatgccctgtgctgtatgtgagggctgagccatgtgactcttctcaaggtcacaggagccagttgcatgccaggtatcacctgggcccggcgttggtgacagtcaagtgcagcctgcagaggcctccctgctcggagttttgttctgtggtttggcatataagattcaccatactctgtcattttgaggtcaggcctgtctttaacactgggtctttaacacttcacgtatagcagaggagtgagaagcaagaaaggtccagccccacaacttccttttagcaactccatcttgaactttgccctgcccactgtggttatcagcatgggcctgcaggtatcccaccctgcacagagactggcagcccatccatgcagaggccaagacaagagcaggacttgggctcccagatcccctcagcaactgtgatcgatgatagtgctaattgacgattgtaactcattacagactcaccgtaattaaatgacccatcgatgcctgggagattaatggcatggccagcttacagcaaagttgcatttagtcttaactcacattccagtgtaaagtctcaggaatggtgggatctagaggagggaaccccgtatcctttgtgacccaggcttatcccagagttgcccattcctagtctggggctccctggaaacaaggaagcttaaggctcaccctgccctctagagacaaggggtgaattggtgaggagccaaaagcatatgccagggaacattggcctgcatttccccggcctcatatgcctgtcagattgtatggtgtgaacttgcatacaccaagctgaagagctttccctgtgctgtgcagcacctgaggtgctcagtcattctctcagggattttccacacatggccacggggcagcagcaatggtccccttgctggtctgagtgccactgattcaccgtggtgactcctgggtgttccagggccttccctgtgcagggtccaggaagctaatggtgtctctgtggggtgtgaggctaccacgtgtgctaggtggaaactcagtgtgtggaatatcaaatgtgggaagggaccaccacacttcatatctcctgtgttgcggctttgctgtgcagcgtatgcagtgtaccagagggtcagtgtgcagaataccaaatgttctggggagccaccccacttactgactgtcttgtgtgtcagcagcactgtgcaaggtatctgctgtacctgagggtcttctgtgtgctgtatcagatatgtcagggtcactgtgtagggtgtcacgtgggctaggggtcatgatgcaggttgacagggcacatggagttatccagtgaggtgctgatccagtatctgccaggctgaggggtactgtgtagaatttggtctttggggacatcactgtttaagtataccaggggagtcactatagaatagcagattttctgggagccaatgctgccaacacagtggccacagctatctgggccttggtaaacctggtgggcaggccagggagccactctgctctgcaggaaaggactacttggaacagatgactgagctcagtttccatgtcacctactgttgccacctcagaaggcatgggcagtccccacagagggctggctggttcccagtcatcgactggagagacactgcagtgtgagctctgccttcctctccctccttagagttgtggaaagtgctggtcagtgtgcttttgccagcctggtggtcagcactattggaagcttttctgggtatagctggaagacaccacagccctgccatactgaggcatcacctctgtgtctatctctgtcctaggaagagtgctgccatgtatagacaagccagtcctcccttgtggtggctctgccctcagtgtcctaaagcagaggcccagacatgcccctagtggctcttaccatgagtgggtttatctatcacatacttgaagtcaagagcatcagagcttgggtgatctgacaagggccacattggctctgcactttgtcaggggagcagcaggacttggcagctggctttgaaaaagctttgaggggtgcaagcacaaagtgtggcccctgggaagcctacttgaatccaataactcatggaatactgagaaagaggtatgcagggtaaggagcttttgggctcagtatggcatgtgtgtacacatgaccttccaggatcctcccagctggtactcttatctacctgaagctgtggtttctgctttcttcctgtaaacttgcttctgtagccatctctgagtcccagcccctggttacttcagcattcagcagtatagaaactggctaagagtatgggttctcagaagtcctggccctgcacatgtgctatgctgaccccagtcaggcctcagctgcctcaggtagtactgaaaaggatcttggtgctgagatgccagcagcttgctgtcctggccatgttcctcttgctgtgctccgagtgcatcccagggtcaggttcagaagtcatgggatggcatggtgtggaaggtcctggagcctagcaaagctccggagctcgggcagtccagttgcttttctgggatggagccatgcaattcagaatctccaattcaggctgccacaaagtggcatttgggtctccaccctgccttcatgtgaccttgggcaaatggtctacttccttgggaatgctgtggtgtcagatacacccatgcgtaagtgcctgggcacactttggtatgagctgtgtgacatgccctagttaaggagtcaaggcccaggacatagcagtgactaaactcagaagggtggcagtggagttcacagctttcttcctccatgctgggagcaggtgtgacagaagcaggaaggacaggctggagagtttgccagagctcagtgtctctccttattctaggaggtgggggagaggcgagcaaggacaatgctttaattgtgtgattttgatctgggcagagactcttaaatgctttgtaatctatttttaataagtcattcaaacaagcccagctccagttaacgtccagagccgatagcctgccatgcccgccccacccaatccctttgaagggagactgcccttcgcttccccttccctcacaccctgtcttcagtctcacagaaacctctgtctaaggagagaaacaatggacttgtggccatttctttgcctgactttgggaagattggactggccgaggtgtctagaatgcaaacatggcccgctgatagaatttctatcaagacatgtctgagatgagcagggtacactggcatgggctgtggcagaccccaaatgtcatccagtctcagccctattcgctgagtgcctgtatgagagactagctgttcactctctactgaaggacaaatggacaggctcccagagttatcctgggggctgccaggaacacagatgtggctgctggccttctcctcccatgcccccactctgttctagacaggaagctattgagctctgcgactccaggcactgtgccctactgacctctgcgactccaggcactgtgccctactgacctctgcgactccaggcactgtgctctactgacctctgtgactccaggcactgtgccctactgacctctgcgactccaggcactatgccctactgacctctgcgactccaggcactgtgccctactgacctcttcgactccaggcactgtgccctactgacctctgcgactccaggcactgtgctctactgacctctgtgactccaggcactgtgccctactgacctctgcgactccaggcactgtgcccattactctcctcctcctcctggctctcaatcccaggaaattctgagagccccatgtgggggccagctgtattatgtgtccctggcctatagcctggctatgccagtttgtcagaaaaggtacctcaggacattgttgtggacagccatcttgctttccccttcccaccctggcttcactaagactcctggtttcccacacttcaactattgtggtgaaccttagcctcagccccactcctctcattaatgggccataaatgcttcactgcttcctattctgtagcccggaacacaggcaacatgggcagtggcacctcacaaagaccatgctggtttagcagttctctcttcccacagcttcaactctgtctggtgaaaggaggcctaagagggcaacaatgaggttgcatttagttgagccacgcacacatgcatggtgtccaatatggcaccaattctgcaaggtctggccatggggctcccagcatctgtcagcgtgccctcactcggcagctccagccattcctgactagacagccatccctgcctctcctcacctgttgcttgccctcctcaccagatgactcctgtggtgctatcgcatgaagggcctcagaggatccctgttagcctgtgcagtaactccaatcactttccacagcatggtgtctgctgccctttgccccttctctcactcagttctctattggtgattgaacaaggtacaggctcaaccagcagtgagtgaatctcagaaaagttctaaagtatcactcaccagccaacggtagcagcacttggaagctgagaagcaggaggatcacttcagggacagtctaagctgtatgaaaccctgtttcaaaaagacaagagttgaggctggggagaccaccttgtatttgttgtgcaggcatgaagactaagttcaatccgcagcccctaataaaagctgggctctgaggtgtttgtgtgtaatgatatccagagcggggtgataggagtcagagaccagcagattcctgtagcttgctggctagccagtctagctgaaccagttagctttggattcagtaaaaacatctgacatcaagcccagtatgggggtgcacgcctttaattccatcactcagacagcatatggatttctatgaattccaaggctagcctggtgtatatagtgagttcccagacagccagggatacatagtgagaccctgtctcaaacaaacaacttataagcaaaaacaacctccatgcacagaagaaacatagggctctgaacctaacagagatagggaaaagccagggcactgtgatagcctacaggcaggaggactggctgagagaaagagcagtcactccatagctcacaatggcctgtctctggttctctacattccaagtctccaaggcagcctgttctgattagctgtgcaaacttaattagttcacatccaagtttgtggaaggcatccctcaagggagctgtgtgaacagcctctggttaccaagaagaccagattccatgccgaggtggcagtattaatattgaacatagcctgctcaggctgccagccttccccagcaaagtctcatcttcctggtggcttcttgaacatgccaccttgtaaataatattaaagcaatttcttctggggtgtcaggaaaagagaaggagtgggtagggtatccaaaagcaccctgtctaactctgtgaggtgagcaccagctctagggacacatcacccttgccaagagccccagatcgagccaggtcaccagcactgaatgaggctggcctcacctgctcttgagcctacaacatggggtgggcttggctggataaatgcccatcaggagtttttcaggttccctccagtatgtctgactgtctagaaaacacttctgctcctaacagttgcccagctgcggctgccaacgcattttgcgggtgtttcagattcaccctttagagactctctcagcaggggttggggtgctcaaaagctagaagcaatttggataatgacacatcctgttccagagcttccccaatcaaagggaatggccaggcctttgatcttcagttccctggagtactgaaaagatagacagtcaccccctctgctgtgcccccaggccctacccagaacagggccctagcctgacctcctgggtattgacctaactctgggggagactgtaccccctactcagaagagtgattcctgctcctgcgctcttctataggtgccatccccagactccctccagggggagcacctatcctgtctgctcactccaccccagctctcctttggggagcacctgtcttataggccccatcctgggtctcctatgtttgccttgttcacttcatcccaggcctccctccggggagggcaccttactgttcgcttcacacaacctcaccccactcccccagaccacctgctctgctgactcccaaactgacagctgtatggcatactccttgctgactggtttctcactatttcctctaggctttcttcaatggcctagagcagctagtgtcagtgcacagctagtgagctctccaggggtgtcagaacccctgtccaacagggcaaatgtgggcctcagggaggtgacatctctccaagcctgaggctccttgttctgaacccagctagctatagtagacactagagactgcctactacagctctggctcagtgccctccagcttcctgtaggcttggccccccaacagccatatgtaggaagcttgttacagacactgcccaggctgggctccctgctcgtctcctgggtctgccactggccacacatcctgcctcgggctcatgttgctgatatataatgggctctccatggacccttgattggtttctaactaggtccccagcccatctcttcctccgtcccttctctgcctgaatggtcacatcaggcacttgcctctgggcctcttctgaggccccctcaattggtgctaccttttcatgaagccctgggtctggacttagaacaggctagtggtctgagtgtgtccccctccacatccccagctccatgccagaactgctccacaataagtgccccttggcctatacctcccctcccccaccccccttgtttattaactcagatcagcagacagaattttcctgtttctgttgaatttattccataattaccccctgttggcagcaaactgtacttattcctttttacaatagagatgcaaaggttattttatgtgaagtttatttatgttaatgagatgttgaatatatcacagcctgcagctgttgtcaggtaacctccactggtgggctgaccctaatcaggctagtcaccgtgcacatggggctccgccttacacacctggctccgccctgcacacctggccccttcactgtgcttgggaaacaggttgcactgtctttggatcaagtgcagccctgactcaagtcctcaggcccctgttctggccccctggaagacttgggatgggggcaagatgggaattgagggctgaggggaaaggccagtgggcctctaggctaggacttctaaactccctctctgtcactgtctttttcaacccaacaagaaggtaagataggtacacaaaccattgttcataataaatcagaaaagaaatttacttgaaaaaattctttgtcctacatataatttttaccacctattaaagcggaagcaagtttacatactagtagatgggtttgtctgtttagagggtgtgggtgcacatgggtgcacatggaggtcagaggacagccttgatgacattcctcaggcacctcatactttgtgattgagtgagactggatctctcattggtctgaaacatcaccaagtaggctacccatccacagagccatccacctgtgtctgcctccatctttaccataataggattacaagtgtgtattactgaacccagcttttttcatagattctggggattgaactcaaacactcacgcttatgagaccagcactttactaaccaagccgtttcctagccctcctgttttccattgtttagtgtctgctgctctgggatgtggaccaccttcaacatttgattttataattgtcaaggctaagaactccttcacataaatatgccatacaagtggcagatgcatgtttaggcacatttcagaaattggtggggattctgccctaatcaaaaaacaaagttttgaaaattttaacagttttgaaacccaagtcagcagctgtaagagcaatttttaaatcttcagtacagtgcaaagatatgctaatttgatactttcattgctaaggactggcaatcagaagatataggaaagcctttgcattccacgactaaaccattatgtttcaagaagagcagaagacattgtatgtgcagtcagactgcagttcacaacatccagtggtcctgaatcttaggcagtgttggaggcacctcattggtggtgctgtggcacacacatatgcactgccacatgttaagagaagagactacagtggtgctgtgagatgcagcccaggggagctctgttggaaaaggctctcgctcatccatcacttgctggttttgaattacttctcagtcttggtaccagcacaaaccttttactgtttccataatgttttgtggcctctacatccagttacatagtctcctcgtagatggtgaccccccagctgaagaagctgcttctaggcagggcttctcctgcctcctgggagatacttggcaggtctggagatctacatggagactactgggacattgttacttctaatgagttaaggtcaggggtattgcaatgtaccaaagatttccccatctactaaaaaatggctcactgtacagtgagagcttaggacctgttcttggggtagcctggtcactgctaagacttgggcactatgctgtctagagaacacagagggctttgtgggtaaatgggctcaatctgtctacatgccccatgtctctcccttacctaagaagactgccatcttggcaccatcagaccaagagtgatcatatcagcagatgacatggtcttgtaggaagctgaccagcccatgtcttatttattctcagcctagctccagtctcggtcaatgggcacctgttcagagaggtagagcctctctgaggtagggcacatgctagccagggcctccatgaggaggatagacccagctggagcccagagcctcaccctgtgctgccttcattggcctcttctctcctccctgcttgttgcttcccagccctccttggtgtactagctgagcaggccaggctacctcctgcatccccacattaagccccaacatgactcccggccatgctgcgccttgctgttgtcccatttttgcagcagagagcaccatgaagcaggcagcatagcatttctgtccctgacccagggcagcccggcagttgttgtgttattcttccacctaaccagccttctgagtagtttccgccttatcgtcaggtccttacaaagtccctgggctgtggctagtggaccctgagagaggctgccccaccaggttccacttcaactcagcagcagctgtcccatgccctttgtgactgataccctctccttagcataaggacaacagagctcccaagtccaggttcatctccagcacccatagaagccagtcctgccccaaagtcagtggagttccagccaggtagccaccacctccactagttcatgctagcactaaatgcctgcctgtggcctgtgtgtttctgccaagcctggagactatgtgccaggctgtgtccttcctctgagtgttcctgctactgcaggcagtataaacaggagggccaggggagtagcccactttcggccatatgtcgctggcctgtcagtgttaatcaactgcagcctccaaccaaggcctcctagacgcctcccagtggcctgcactacccacatgtcatgtgacagggtacatggtccttttcatgatgaggtcagttgagcatctacaggagagggatacatctgggaacacccagcatgctatttgtaccatacagtgtgccacacagaagacagactgggttccccatggtcttgtgtgcccaaagccaatactggcctcccttcttgtcccacctagcccttattagcaagacacagcttatcttacttgcatgaagtcttcctgggcaacaggctttagaccaacctgcagttacccatggagctgcagctccgtgaaggagggacagaggacatggcagcacattagtgcaatgcatggcctcaaccacacctattacctgagaagccatttcttggaaaggtaacatggcccagggagcaaagccagccctactgtggagctagcatgggctccttgggtttggtccaacccagaagcaggcatttggcccacagatgcctctcttctcaaatatgcattcttgtaggaagagcacagaagcccaggttacctccctagaggtgctgctgagttgatgacattaacacagaggcatgtacatctgtgggggtggtgccctcttatggaaggaacatgctgtgcggtgagagggggccatttgtgaagagcttggggaaaacattgtaagaaattataggggctctggccatggctgtgtgtgctgcgtatcactgcttatcggctgtttccccaagccttggtgtttgactaccctccacctggagttaaggacacttgctctgggggatcagggttatctggcctcatttccttagtactttagggtacaggaggagtggccatgggaagactcatgtgctccagcaggtggtgcacctctgcaaccctggcttggggctaacggctgcaggcaaagctgtctcatgcagtgggtcctcaggaactgccctgtagaagggtgatttacatttctgctttatttcaattaaatgcttgggactacatgtgtctgctcgtattaatgaatgccaagttccgtaccttgacaatctctagctccacagacaacccattccccattttctaaacatcttttcaaagacagctctgcctctgctgggcgggtgtctcacacacacattgtgtgtgtgctttttaacagtacaagtgcccactgtgccacaggtctggttcagctcttcaaagtggtgcttcctgaagcctctttcttcccagtggctgcccagcgagcctggaagccactgaatgcccagctttcgctctggaacgtcaggtcagtgggctcccaggcagaatggcgtgtatgtggacggtggatctctctgacttctctacagttcgcctaagatctcaatgggatctgtggccccaggaagccaggccgtatgtttcacctcctagatgcacaaggggcttgcccagtaccctgggcctcagagggtggaccagctgctgcagatgccctgggccagggtgcaacacgtggtacttccagggcccagccatcagccacacactgagaaagacaagcctttgttcctaccatggtgctgacattattacagacatgtgtggacaatgcagactcttaagtcttttaacaagtcacctcacctctggcatcctgtcactctgtgcccctcataccctgtgggtccacatgggatctgatgtaacacagaaaggagcaggtcagaggacttcaaggtttaaatgccttgttagttccgcagcctgcaccccagtgcctcctaccctggggcaggggtccctgtagtccacgaggctgctactggtcaggattagagagactggggaggaggccacagaggaggaatgtggatgtgtccctctgtgtcattgttggctgcttaaggaaaggaactctgtctctgtaggagggggagcttcctgcagatgctgctcctcccttccccctgcccacacctgaacctaagggtctggtaaggaccataccaggagcctcagcaggactctggctggctctaggctcccagtgggtatggccttgggggtctccatcatccctggtagaaaggcacaatgcaggctctgagaagcagacacactcaccgccaagctcaccctgtcctgtcccatcctgtcctgtctgatcccgttttaggcctggcctcattatcccaatgcttgtacccactgtgccctcagcctgctcttcactaacatatggagtgttcaagtccagcagcaacactgatagaactcagagttctcttgagtggggagcacccacatagagaacttagagcctcagcctcacctctcagtccttgacttctgcctaagcaggtgactccccagcaaacaagcaagtgaaaacacctgtggaccagcatctcgcatcagagccagcattcctcatatgggccaggagggctggggctagccttgggtgcagctggagcctgaagtacagggaacaggcacctgcaggaatagaccacaaaacccccattcccaggccacagcgaggcagctaggatgcccaggggaccctgtgatgctctgggacccccctttccgttactgatggcactctggtaatgatttccccactcacaacctgaccccatgctgaggaaaagcaagttgaaattaaattaaatttcaaatgttaaaccaaccaattaaaaaatgcaatcacacggaaacatgcatttttcaaaacagtgttgtttattctgtcataattaatgtatgcagagcggagagtctgggttccctagggcagcctgctccagcacaggccatagcctggacgtggcaacacactggcagctcctggcactttctgaccccaggccccaggatttctactctgccttcctgcacccagcaatccctggagaaggaggtggtggtggaggaagaggaggaggaggannnnnnnnnnnnnnnnnnnnnnnnnnnnnnnnnnnnnnnnnnnngaggaggtagccagattgcaagcccctagccctggccatcagttgggcatcctttctgctgtaccctttgcttcttcccgggccgcttaccctgtacctcccaccccctcaggctagcgcagagactttggcccgctgtgcttccccacatcctccaccagccctgctccttcacataaagagcttctcacaggagtggagcaggggatccgtgttagcccaagtctgtgatggcagagccaacaagggctgagagagcctatgctaagctgtgcttgaggtctcactaggtagggcacagaaatgctgtccctcatgcccaccgttgtgaacgactccctaacagggctctccagggacctgatacttcttcacaggtgtctcagctctagttctatatgaggtgcaggcagccacttccacacatggccattgatgtctctgttacagggaaaggcaggtgcgggtcctctccccatgtgcttcagatgatgcccctagtggtcactgtcaggaaggagactctagctccacccaggccttgcttctgctctgtctctcctttccttcctccttggtctcccctactcaggaactgtctgcaagtgctccttggagaatgtatgtgtgtgagcagggatgacaggagatatgacaaggcaaggccttcaggtggtgaccagaaggaaacagttctaactgtcgtacacagctccatctgctcatcttgaaggctactgtgtgctgggctaggcatccacaggaaggctgtgtcacaaacagaagtttatgtccccaacacacacagtagtttatgtctacctttgatgcacaaggaacctatgggggtttgggggctcttaagtttcctccaggtggtaccaggatctgccacatagtagacaactctagaatattccagagtcacctcatactactgacctgaaagtacctacagcttttctgcacagtggatgggtggagctatggctcccctcccttctgacagcagttgttggggaaactttctggacttgggtaggagccaccaggcagctcctcccaagctcctctttattaatgacgcttatcgctgctcacatggagctcagcgaatgcagaaggtggttgataaacagccaggcaacagactgcagtgatggataacctgctcaataattaacaaatgagccaacagatggtgggggtgggtggggaggataggcaggtgatgctatgtgtactaaatgccttgttcctccccttgtctccagccaactgggtgtggcctgcgcccctgcaggaaggtactcttcctctacctgcttagaatggagctaggatgtgacaggcagctgctgaaggccagggtcctccacccagtctagcttctggaatctgggtggttctttccccaggacaacgtgggagacagagcctcagcaaagagattctctagctgcagatccaatgagttggtctcgttgacttggaactacctagggcagttgttttcttttccatttcttctgggatggccatgttattccagcctgccacacccttgtactttggattgtgtaatttgcttggcttcactctgaagggggactaggctgggggtgggcgtatctgaggcttgcctgtctccgctgtagatgacatttggtgggactccagccctgagatgtgtaaactaaggaacctccgcagcagacactgctctgccgggcctcaatcttggtatttatacctgagaactatgacggttcttgtcatctttgtgccacctgacacaaagcaccatggcagaagctacaagccaggtctaccagtgggagcctgggcagtcagagtttcggaagtcccaggctctgtgcttcagtaactgccatgggtcagctgtgtacggccattgccttagctttgaaaagtgcgcagataggagcagccaggagcttggagggtaaggacgggacacagcctctgtgctggtgcatgcagcttcagcccagaagataaagggggatgtttatgcagcaccatgacaaatcttacaattgttcgtcatattgagatgcctcaatacgccatactacagtcagggagagctaccctcctacctgatagataaacagccaagagatagaattgctgtctaatttccgcagagctttccggtggctgaggtaatgagggagcccctgttcttggctgcttggttcttggaacaaagtcacagggagaggctcccaggtgatccctcagccacttgcccatagacttaactcatccggctgcttctctcctgaacctgaatgggagatgaaggaaaaatcacatggtaagcaggcctgaaataacagggcctccttgcaggcacaagaggacttgacagcaggggtggaccatgtctcttggacagggtcagaccacagctgtgactcagaggtatgacagaagagggccagggaaggcctctgctgcagatatagttactgctttgccatcctcccgtcccaccaggacccactagagtctgctgagtgagtgcagctactccatgctctgtcccttgtaggaaaagccagccagcctctgtaattgtgccatgtgttactcacagaaccttctcaccaggccacctgacagttgtcatgcctactgtggtaggctcccatcaggtcaggcctgtcacccttgcacaaaggtggcaatgtggacaaagcagagatgcccccaattgccagtctacctggcacgtccttagtgctttggcccagggacttcttcctcggggcttctaggtccttctccaagatctccagggttgtggatccactgagggactttctgaccacaggcatctttactacccatggcgggcccatcgttagtactcagggtgtgtggagagaagggaggaagaactgacttgtggtgtaggagggagctgccttccctgcaggctgagcccacatctcagacctcagtttccgctcctaccactcttcatgtgtctgctccagaaaccgaagatggccgctctctccactgcctgggtgaagggccagaagcaccagcagcagtcattaggctgcctcagacgcctggtgatttagcagtgtgattacctgctaatgcaatacctcacaaagctttttattagatttttcccccttttccttccaaacaccctttggaaataaacacctgaggctgttacactctataccactcattttaattaacttttaaatcacgtactgtcacccagacctccctcaaatgttaactccggactggactgggctgggctgggcttggagacctgctctctctgctttgtctctgcccacggggtggggactctctggagctcagcctcaagtggccttgagtggacatttgctgcttttgtgaggttggtcctactacccagtagaggacccgatgaactcaaggggcaccaccttggtcctgggcacacatagatggcacagcagacaccaccgccttccctactgcctacatgtgggtctgaacagcacactcttgcccctcacatgggcccagctcatggctaggacattgtgggaacctatggacatacaacctcggccttctcaggtcacttctgcatgatcagtggaaactatggtacccacccctgtaatctgtcagtagcctctgatcttgtgctcatgccccgactcctgtgcctttccctagccacacctgccggccctcacattctgcatttaagagcctgtggcattcaggtctccatttaactctcagtcatagaggatggctcttcccaggagaggcagaatacagggtgggtcatcatgccatagcagaagggtggctcagacaagggtgccattacacataactacttccatccagcgtcccagtgttccatctactgtagaggaattccatccaacatagcagggttttacccagcataccaggatcccacccagcatgttagggttccatctaatataatacgattctgtccagcataaaggggttccacccagcatgttagggttctgcccagtatactagagttctgtccccagcctactgcatcctggggtttcatccagcatacaggtattctatctaacatgctggagtttgtccagtttccagcgtcccagggttaacccagtgtaccataattccatccggattgctggcgtgctctctaatatactgaggtgccgtttggcgttgtggagtgccgtgtaatgtatcgggagccatctgtcgtacctttcgtttagcgttgtggagtgccgtgtaacgtatcgggagccatccgtcgtacctttccttcttgtgcctgctcactggctggttttcttccctgctctgtggtcacgtgggactggcaggctcatactcttccccacttcattttcattcaagctctaaaaggcctggagttctggtggggtcctcttgtgccggctgcttggcatggtagtggtagcggccattgtagccagtttttctaggagcttgtagtgcattggacagggtgatcagggtcacagtggaccccttgcccttgtctgtaccttccccacagggcaccagaccctggttctgtctggccttcctccagctagttttgtagttagtgtgtggtcagctcttccctctgccctattggctactggtcaggccacaaaggctgagattctggtgtcccctctagtctcctctgtgggtttcagtcccttgtccttctgtcatctctgaaaggtggtgggaactggaaggttcccggtatatacccatagaactcaattccagctgcctataactgtgatcatcccaccagagtgcaaattggacatgaggatcttggcgctagatgcatctgtagttttatgcttgtaaagatgggtcccctgcatgcccaaacattgtgggtgggtttgggatgaccctccatatacttacttcacagtcacagaagcaagttgggtcagcgtgcctgcaaaggcctcagcccagaacttgacacttggagcactcttatgtactagctaagtgtcatgctgtgtgcaggggaagcatatagctgactgtcaagtgagcagtgaagggatggtcctctgcttctgagtcatcccaaggcttcctggtcctctgtagccttgagtcctgggagcccctgggcctggcctcaaactgacatcacctttcctgcagggcagtgggtgtgggggaaagagagaattggagaaaacctgaattttgccagagttctggtgctctagcaggtggattcaggagaactgtcgcacattttccacgtggccctgagtgggtgtctggctgtgggaagctactggaccccagcttggcaaagagtgaacaagggacagccctaggaacaggctcttagtctcgggcatcccagacacagctggacaccgcagaagagctgagaacaaatcggggccccaggggaggctcagtcagccctgtggacgaagggaggagagggcaggggcagagggggtgctgggtggtgcccatgagggcgagagtccttggtccggtccttggctggagcgcaggaaggttagatgcgactcgttaggagaaagcctatccacattgttcaagctcagcaggccttgatgagcagagagcaaagacagtctatagttttagagctttattgtaaaaaggcagggagaaagagagaaggtagaaagagggagaccaccagccatggccatggagagaagggggaagggagagagaggaagagagctagagaggagagtaagaaaggtgagagcttaaagagagtgaggaggggccaagcagccccttttatagtggcctgggctatcttgctgttgccaggtaactgtagggaggagcatatctggctatagtcaggtaactgtgggggtggagtctagccagaatgccagaagcttgggacattgtctgtgtaacttacagtcacagaattatggagttgggggctcggtggtgtcaggcacctgactctgggaatgctgttctgtcccatgtagagttttctgctgggtcgccagagcaagcctcattcgaccaaaataggctgcctttcacggcctcacactttcctagcccaggataggaacctgtatccctaggctctgggtctgtcaggagccctgcaggaatttgagggattccaggaaagagagttcctaacagcccccataggccctgacatggggtgccatccccggtacaggacacctgcaccaggcagccagctagcactgggactggggcattcttcaatacacatatgtattgggaatggtcgtctgtctccagaaacaggaataaagagggctagtaaggagcagctcccgcaacccccaggaagtagagctccctgttgttgctgcccatggcataggcccatcccaaggggcttccaaaacaagtcatccaggagcagcctgtgatgagccaccctaccctcggggggaaggggctgcccagctatttagcccagtgcttggcaaaggtgggcactgccctacagctgtgtgtctgcactgctcagatcagcaaaggccaagagagagatgtctgcagcattgttctggaaattagcttcccctctccctgaaggtcgtgcactccactagaaaattaaccaatattttcctaatcaaatgagactgcctcctccttggaggagaggtggctgtgtccagaagctcattcatcttggaaggcagcagcacccacgtgggcccttgttttattaaataacctttcctgtatggctgtctctccacctgtggccaagtgctagaactgaggggaggatggcctggtgtaacaagtagggggaggcttgccccattcttggctacaccatcatgactgcctgatgtctccacagcacatatcctcgggtttaatcctccttcctcattaatgtcctatgggcctgattatctagttctgcttccccctgtgtatgccatcacctagtggtcctgcacaagatgctgtaattcagagcagtcccccatccatacaacctgagccaagaagggcatgtgcccagccagccaaccccaagaggtcttggaattcaccctcatagcttgagcctgcacctggtacccactacccctcaagccaagtgctgggctagtccagcaccggtaaggcacatggactcttgagttttcaaaactgtgaccctaaagagtaaagaattgagccaggcatggcagcacaagccagtcatcccagctgaagcagggaggactttgggttctgggctaaccttgcctatatcgtgatagactaacttcaaagcagcccagctgtggaggtgactatgaggaaagtacttgtgagagctgagttcaatccatagcacccatgtccaggttgacctgaaactcactatgtagcccaggctggccttacattcatacagatctgcttgcctccacctcctgactgcagggtggatgaacaatgtgccattgactggtgtagaccatcttgctgcagataaagtgtcattttacccagagccatgcttcatatctgttgctaagagaggagggacatgtcccattgcaacatcaacaacagaccgtgtatcacatagaccctcaggcttacatggcttggttatgtggctgaaagttctctgtaggatgctcacactggaatggcgatgcctggcctggcatttgcctagaacgtgctttgttattgatgacacattacttcatgtgtgagaagacaattgtgtatgtatgcacatgcacaagctggaagggaagtggttgtcactcttactgtagagctctgagtaagctaagtcagtgagggatcagtgccttctctgtgttttcctaaagcaacagaacacctgtaaaaaacaagtttggagggctaggggaatggaatgcatgagaatctgagttcaaaccccaaaatccacgtaaaaaaacaaaaaaccaggcatgatggtgtgtatttacaaacctaatgcaacagaggtggagacagaaaagtccctggggttcgctggctagccaaatcaatgagccacaggttcagtgagagaccatgtctcacagaagatagagagcaacagaggaagatctccaaccctgacctctggcccccacacactcacaggcatttgcatccctgtgcacacaccaaaacaaaaacaaagatggggggggggggctagagagatggctggggaattaagagcacttgttgttcttagggaggatggttcgccgcaccacatcaagtggctcacaacctcctctaccttcagctccaggggatccaacaaccgcttctgaactccatagccacctgcacccatatccacatatccatatggttatatatatgatcttagctcactcagaacatactctctctctctctctctctctctctctctcacacacacacacacacacacacacacacacacacacacaagaacaagggcaggtatggtggcaacatgcatttaattccagtgctcagaggcagaggcaagcagctcttgttatagcttgacactagtgagttcatgccagccagggctgcacatggagactctgtctgaaagctgggaggtgtatcatcaatgccgttacccccagcagcaggaaacattgccattttgctgagtatgaccccctctcttgcttgccccagtccttacagttaggatagcctgggagtgtaccgcgcctgtctattcagtctgcttatttattcacataaacactctgtgatccaaagagctccatctcattccacctggccctcacttccgaggcacagacgttgatgtctgaagggtcaggtgacctgcccataggtccatagctgcaggttctggcagatgtcaggatatcccaaacacccttccatggagctctgtctgcagccaccactgcgtgcaactgagttatgggaccaggggctctgtcagtgtctgggttggatgtgtgtagcttcctaagggcatcctccaatgtcacatgacggctgtatgccaagtgagcagccggtgcctagcctgccactgtgtacgtcactcagcccttgcccatccacactgctcaggggtatccaggaagaaaaacagagcttgctaaatggaaaaggacaaactcagttggaaaagagatgtggtcttcaacaccctggacaagtagagagggtgctttccctttcctgagacagatgacaacatcagagtccactcaaaatcatttcctaaagcaaatcacaggatggtacctgccggatgtgagatgatttgtattctattcttggggccaaggagcaaattgactacagagcgtgttttgcgatttcttttttaaatgaatgccatcaatgaaactgcagcagcaacagcagcacacggactctcctgctgcaagacagggacagagacaatcccagcaccgctcaagccacaggattcgctccaaaggcagacagcaccttcctcatgctgaccaaggatgttgaccaccccctccctatgcccttttctacagagagcaagacactttgagcagtctgcaggtgccacctccaaagcatctgccacgtcctgagtcagctgcactcagccatccttcccctcacctgctttcttgctggtggagttaggaggacacttggttccaaagaccaggtggattcaggtggtcacttccttcttccctcatctccttcatggttagacactgcatcccccatcaccctgtgggtctggagcacccctctagtgcacacagtgtgtcagttgtagaatcctgggagtaaaggaactaatgaagtggcatcagtcacccatcctgaaagtggtttgtgaccttctgatctccccctgaaactctgcattactcaagggagaggtggcactggttgctaccagtgcagcctcagggctggctggagcctgcggatatgaagcctattgggcaagtgattggcctggaaatggaggactggttcttgtgtcatgtggagaatgggagatgggtgagcgctgggctcaccattcactaggtcaccacacatgctgagttctgagccaactgaggtggggctggcaaagtccctgaggctggccaaggtcagacagtggcctcttctgcactggaattctgtgctttgcatgtgactgatcagggctcactttgcattagggccctgtctcaagtcagcaaggctgcaagaggctctgagtagagcctgaccctggagggaagcagagcccctttcctgctgttcaactccaggggcttgtagaccctgtgcctattgtgagttagtatgcctggggcctgccctcaccctatagggcacacctcatagggatggtaggtaaaatgaccatggctgctcaccagccagctacacattgtcttccacagtcctgacaagaccctgggcaggtattgtctccccacacctgagcctgtgttcctgacctccctgaggaagctctgagacagttggtggagctcatcatgagcagcctctgtagggcctatgagctggcccctccccaccatgcagcctgaggaagtccctcgaaagaggtttaagtctggtacctccaatgctgaccctcaaggaaaggccacaaggtagcctcaggagagggctatgtgggagcttcctggctaggatctgctgtaaatacccacctagagtcctgtgggtagcctcccatctgagatcctcctggccacccatctctaccctgtaaagcacaaagtcacaaaccactgtgctctgtcaaccacagacctctccattgctcacagatgtcaaaaggctggggtcatgggaaagctgtgttccctgggagcatgtctagatgtgtgtcaagctgggtccaccctgtaggaggctcagtgacactggatgagacacctctaaaattgctggctactttctaaaatcgccttttaatcccaacaaagacataaatggctgtgaacagtccaacatgccctcctggccaccctccctcacaccagtcccattgactttgtgggctcagtcctcttacaaaagaacggacctcctctgtgttcctctctcacctacactcactcactcactggtcctggccaaaggcttcaactgtgctgagctcagcaggagggaggggcagatcagtgtcatgaggccatggcctctgggtaaagaatgacttagctctcctgctctgtgagccctggcctcagcccagcagagtcttgctggcactctctaagaagactggaccaggacaaagcctgccatttcaaaaatgagcctggagcctgggtctcctccccaatctttgtttttgactccttcatattaggactccctgtaggagacatgcactttggcagtgggatgttttaattgcctctcaaaatagcttacaataaagaacactaaactgtgactaaccaattgtatttaaggaagccctggcacagtcagaggtgggccagctgatggagcctgcccactcacacagtcatggagctaccgtgtggccatgtaggccctgaccccctctgggcttcctgccacagtcccctgggccggtttcaattgagtgttcccgagaagggagtgttactctgcagcatcagtgaatatccacaatcagagaacctcagccccaaagcgaaagcagccagcagcacgggcagctgatgctaccagactctccacacagaaactgtaccgtcagagactcttgaataaaacagccagggcaggaaggggcactcctcttcatggaccctgcttccctaagcagtccagtagccattttcatccaccatctctatgtaactcagccctaggggcgagcttctcccttgagtctcacactagtcttgctttcccttgacattggaactttcagctagctagctctctctcacccagaggaggaggcactgagttggtctgcaagctaagccatgggaagtgatcatggacaagtgacctgcacgtgtgcatgtagcatttgatccatggactctgccctgttctatgtcctagagggtcctggatgtgccctgcactttcaaggagcccatgagcagagggagaagggaagatctgaggcagggtccattgccaccctctgagggcacaagagtattggacatgtggcggagatggattgggaaggacctaaagaagatactttgatggatctttctggcacggaggacatgcatccctcctcaatcattcctgaaggtgctcgcctagagatggcaaggaacaggcacccagtaccctggggtctttcttccagcaattgcaagatagccatacagatcctgagtagagagcagagccacccctcagggctgtaacccggaagcttgcccatgcagggcttcagccagaggaagccgggagccaggtgggaagggctgcatgtggatcccagaatccgttgcctcatctctcttaattactggcagggcagttgctgagttgaactggagctggaaagcctcagtgagtaattactgtcagaaacacaagatctacaaagccgtaagctcacagcttggtgatgttaccgagtctaattaaaaaacaagaaagaaaattctctttcatgatcgactttcagggccagtgaaagatgaaaagcaaggcagcttgcagttgatgccaacaccaagggtaagtgagcagtccacacagagacaggcagacatgctagggtggccagggtccctgggatgtcctcagccaggaagcacctgtgactcacaagagggctaagtcacctgacataacagtgtccaagatgagtactaccttttgcggtgctggggacattcctatgaatagacttctccctccagccagtctctactgtaggtggttggggaagttgacttctaccagaagcccctgccctgccagagcctccagcaggcctgcctgaggtggggcagtggggcagtggtttctggtagcataggcacctttgaaccttagaccttctgagcagcctcactattctggattcctccttgggaagaggttgccatgggcagcacatctctgaaaacagttattgactggatgccctgctagatgccaccggtccatgtggtgggaactagatggacgtccgtcagtcctcgatgcagccagcctagaagggtctgcacagaggtggattcagtatggtgagtgatggagactttgtggccttcatctcacggtgcccacggctgtcaggaaggccaggcagctgccttgttagttcgtctgcttgagaactcccagcagaggcactggatgagtctgaagtaggacagaacagcccagtcctgggccaggcaccagcagggtgtgtgtgaggaacttcccagccattttctgagaagcaagtggcctgtcccactggggccactctgccacatgtcagacttcaggcgagtgagacacacagcgaggagagcgcgtcctcgcccctccaagccttcagagatttacctctgaaagtcgtgtcattcacaggatatttttaacccagaaccaacaaatctgccttttagcatcagctgcagcaacagcctgcgcctgcagctttgagagcagatggttgcccggctgtcatctacgtccctgggcccaccaggagccctgagccacacctgccacataggaagggcagctgccttcagcgaggtatgccagagccactgagcacaactccccactaagcactggtcctgagaggccatcacagatcagagaagcctaaacctcgatcctggccactttgccaatacacagtcaaggcctggtcctcagagtcactctgtgctcacctggccttcttcactcctactccatccttggggacagggtgggcctcagcccttttccattcaagctgagtgtggtgccccagacccttacaacccaaataaagaagacctcatggtggagtgtgggtcaaagtacacactggcagcacctaggttccctaggccacagggttcccatcacagagcaggctggccatggatgacccagtatgcctggctttgagtggaatgtcacatgtagcaaatgacaggctctcaggaaggaagccagccatgggtagagataaggcttttctcttagaaaatattttcatagtgttttcataattccctccttagcctgtgtttagctgcatggtgacagaaatcaggtgatgggctgggctgtgagccctgcggtactcactctgctaagtccctagactcacagggggccttcccttccagtgtggacagttggcagccaggcccttactgttaaaccacttattaagacacatttcccggggctagggttccactgagctggagggcaccgacagagatgagggaggggtgccaggggagcagatgttgatgccagtatcttccaccatggctctctcagagggagatggtagggatagttttctattcctctccactctttttaaatatgcatttgtttattattactgcatgtatgtggtggggcaggggctgcatggcacagtgcttatgtggacgttagcggataactttatgcagtgggctttcccctgcctgtggaggttccagggactgaacttggattgtcaggctcctgcggcaaacaccttagttactgagacaccttgccagctccatgacttttgttctgttttagtgattctgggacttgaacccctgatcttggttgggcttgtgaggctttgtggttggcccttgctacctactttctaagacagggtctctgactgaaccagagctcatagcttggctccaggttggcggtgagttctggggatgtgcctgccctgcagagcccctaccactgagcaagcattgcagacagtcaccctccctgctggcttccacatgtgtgccgggagctgagcccatactcaccagccagctctcggccctcttgtggaactttctgaggtctgtaccacttgccttccaaagttccatctctcctgatcctccacagtcctcctccctgcttcaggaattactgtggcagggtacctgtgtggcaaacagaggacatcttttgtagagtgagttctctccttccacctttccgagggctccaagtatcaaagtcaggtcttcaagctgcatggcaagttcttacccatctttttagccccttggctcatttttcaaaactaggttgtgtatttccttgttactggatttcaggagtctttgtatagctggacacacaacatttatcagccataaaccatgctatgttctcctaggccaggctttttaggaaaagtatcagcctagggcccccaagaccaagttctcagtgccaaggagattgatttgccccagagggacagaaggcaaggaattagagacaaagacaggagatagaagataagggagaaggggaaaggaggtgaaggaggggtatttgtcctggaggacaaaaggactgtctctggatagagaagagacagccacagtcaataagcaaatggtacaagaggaaaacctgtattaggatgaggtgtaattggacttgttcaagtgaatttaagggggcttttgattgctggatttccgtactttgatagctgggccttggtagtcagcctcagaaggagaaagtggccaaatggggaaataggccttagtagccagcttcaggaatgtaatctaacagttttttagcaagacagaggagatgggagagaagggcaaggcctgcctgagtcatgttcactacacacttgagctggccagagtcccttcaacatttgtctttttcattctctgaaagcatttaggaagagcagaagttctaactttggatagttcatcagtcctttgtttgtgcagtgtgcatctggtgttagatataaggaggatttctctccatgcttttcttctaggagttctattgtgtacattttacaggtctcatccattggagttgactttcagatctgatactaagcatgttttgaaattctctcatgcacctatagagggctggggatgtggctcagaccgaaaagtatttttgcctagcacgcacaaagccctgggttctgtcctaataccatataaacctggtatgctggtacatgcctgtaatcccagtgttccagagtggacaggaggatcaaagcctcccttagctacttagagagtttaaggccagcctggacttcatgcgtgtctcaaaaaatgtgtgtgaggtgcacacatactttcatgtgtcctggtacagtgacattgcttagaaaatactgagttacctttgtgctttggccatgaacctgagtcagcctcagggtgagccaccaccacccctctatctgtgcttgttactgcttcatccttgcccagctagtcaatttttttttttgaaaaaaaatttttttttgctccagctttgctctttttcagatcatgtgggaatcccagggtatgtagatctccttccaaactctagtctcagccgttcatattctatgaagcgggaaggcagctcgggtgttgactgggcatgcaccaactgtgcagattgtctggggatgctgcatcttagcaacgcagctcccagccgaagagggcttcctctgagcccgtcttctcatctccatcctgcagctgcctcaatcttctctcaatctttccctaggtgattcatgtttcagtgttgttataaaaaatattggcttacacttttcatttctgtttgttgttcatgtcgaacaccctaggatgccgcctgcatagaggtggtgtgtaggcatctccatcttctctctcctgtgagagagcattcactcctgcccctcagggatgggttccaccgtgtgctgttcacatgcactcctggtccgattctactttgcaaggatgcttgggtttgttttgttttatgtttgtttttgaaaaatgcatgttgggaaagtgcctcactagataagaatacttgctatagctacaaggacttgcatttgagacccacaacctacataagaagtcaggcacagtggctcacacttgtcacaccagtactggggaggcagacaacagtaggtgttagggctttccaggcagccacattccggatctatgagagatcctatctcagtgatgaagaaggctgtcctctggcctccacgtgcacataaacatacatacacctgagcaaacaccccctccccccacagagccacacacataaaatgtgttaacttacacactctgtatatctggtttgaggtgaatgtgtgctttctttttcatgggtaatagttgagtcaccatgagtctccagtgccaggcaaccttgtattcttggagaagcctgagtgggttactgtttggaatgggcaggcacttggtcccagcaggttactctacctggggaagtctggagactttaggaggtagggccttactagaggaaacaggtcattaggtgtgtaccctttagtgctatgtggcctatgtcgtcctgtttggccccagtattctcctctgcttctcagccaaagggctctaagggttctattttgccatggctcctgccatgactgagaaactggaaaacaaagcatctttcagtgtttttttttttttttgcagctatataatgtgactgatgtggaggcagaggggctggggagtggctcagtcagtaaaatgtttgccttgcaagcgtgaagacttgagtttaatccccagaaatatacatttttaaaattggggctcaggcttctatccttgtgctggggagatagagacaggaggatccctgaggctcatgccagcctggccagcctaatcagtggacaccaggccagggagagactgtctcaaaaaataaaatccaaggcagactgtacttggactaacatccaaggttgacctgtggccttcacacgtgtgagcatacatgtgcaaaggtagttacacaagtggctcacacacagttgtaaggtagtttcactgcacggtgagagggcccttgttttgtagtttgtgccttttctttaggatgtcttcagattttgatttcataacagagctgagtagggttgacaggtttttggtttttggtttttcaagacagggtttctctgtatagccctggctgttctggaacttactttgtagaccaggctggcctcaaactcagaaatccgcctgcctctgcctcccgagtgctgggattaaaggcgtgcgccaccacagctttttagaaatcatctatgtaagtggctagaggtatggctgagtggtagagagcccagagtcctcctgagcctggagagaggctcagcagaggctcttactgttatgcatgcgcctctggggtccatcctcagaaatgcaaaatggctaagtagatgggtgagtggattgatgaatggttgctttattgtatagatcagcttgggagtcaggcttgtaggccttgtgtgtctgaagacccttcaaggttgttatcccacaggtgttgagttcagggttgctggtccactctttgttgccccctgtggtggtttgaatatgcttggcccagggagtgtcactatttggaggtatggccttgttggagtaggtgtgtcactgtgggtgtgggctttaatacccccaccttagctgcctggaagctagtattctgttagctgccttcagaataagatgtagaactctcagctcctcctgtaccatgcctgccgggatgctgccatgcctccgccttgatgataatggactgaacctctgaacctgtaagccagccccaattaaattgttgtccttgtaaaagttgccttggccgtagtgtctgctcacagcaaggaaaccctcactgagacaccccattatctccttaccgtcattgttttcagggagaaatacactgccgctcttatcttcgttcctctgtagagaaagcatttctgccccaccagctgcttggagatcttgttttccctgaaggtgagcaagctggaggtgtgtgttctgatgccgttttcttcttgccttgtttggagtgtgtgtcatttcctcaagaatctttccatcccccatgtcggttacacatcactggataacagctcccagtggccagttctgaaggcaggatctgaggaggcactgctcaagggctcccttgaccgcagtcacctagggtctcctgggaaggatgggtacagacccttacacagagccgtcaccagggtgtttcctccgtagctgctgcctggaagcctctgtcagttctctgtcacacacggggctgctcacttggaagtagagagtccagcagcaccatcagagctgagtgtgaggtagcagaaccctcccagcttggtgccacacagctggtctgaagccgatcccagccaagggtggggactgatgcggctgtgttacctggatgtggtttgttgagagctgttcacaggcaccactatgctctggcctctgctttggactctagatgtatgtggagccctgtcatatgaccctgtcatgttacccatagatgggtgggtgatttctcctttgtcattttggtatctcctcccctggcgtctctgagattactcatcctctcagggcagtgtgtggccctgctcatcctgtttcttggggccatgctcactgtggggtgggctgggccttctcctgcttttctgtctctgagcttttggtcacatggtgtgaaataacggtgaggtaatgttacccatgagggctgtcccctagtcctcatttcttttctctgtgagccgtgcattcctgagttttccggtaaccagctgaccatcagtgggtactgactctgccttgtctgggccccagacttctgtagattacagtaaatattgttgactttgcagtagagttatctggaagcagtttgaaccttggagaccttggtttaagatttgtgaggtaggacccaactgtagggattccttctgccctgccactgatgtcaaaccttttcagtgtctcctgagtccccacaagctgtcctggggctgggagagagggcagttttcagccctgggagctacaagtgctggctggcttccctctggtcttttaatttgttctggccaggtggctttttacaccagttgccagtcaccatccaacagaagagagcacacttgaagtcatctcctcctctcccacgtcagccctctccctgcaacctcaggacccccatttctatttgtccctttaggtcccttgacttgaaaactgtgcttcatagtttgtggtttgtggtacctttcacatgtgtgattgtatgagtgactatatgcatgcatatatgcacatgtagtaggttacaggagtccatatgcttgtgggggggcatctcctcaatgccttcatttgtttacttatggggtggggcacgtgcacaacgttagtggggccagaggagagttggttctctgcttctactatgtgagtctgaaagatcaaactcaggtcatcaggttcggtgatgcacctctacctgctgagccctctggccaactctctatcttattttatgaggcaggatctctcagtgaagctgcagcttactggctcagctaggctggctggaatctgcctgtctcagctctcctagagacagggtcacagatgtgccatccctggctttagagcagggttatagatgcttcctgccatgtctggctttagaatagtgttacggatctgcactgctgtccctgactttagaagcatacaagagacctggacttagctcctcgtgggtaccatgggctttttacccatgagacctctccctggctccttgtctcatttggactatttcttagggttaagtgactcaattcctattccattgccttgaccgagagctctgcacgtgggttggagcctctgaatctcctacggccccccacaaaggcaccagtccctgttttatatgaggatactagctcagagaaggaaaacagtgttacaccctggtcacgcagcaactaagagtgacagctggggtgtatctcaccaggtgatgtcaacgctctaagtatgatggctccaggaaaagccactctcagagacccagggccctgtaggtggcagacagacgagggaggagaccagctcaacttttgtgtctccctgccgttggcaagatgaccaaggcttcagagcagagcaacccgggtgccctggctctcccacactccagtgtccgggctgtagaaaagtgacttcctgcctttcccctttcctcagggctgaattgcacagcctcccgtccactactgttttcctctctgccccctcttctctaggatgtcctgggcccccgtagcctccgagcatataggaaacctgtgaagggccagggctcccttgtctgccctttagatagaacccacaggctctgtccctgccctgtatcctccattccctcccaaagctgcaggagcagctgtggaactctgaagcaaagcgcaagcctgggggacgcagtgctcataaatagaaagcatctaataataataattgtgggtttgagactcgttaggggctgcaaggcccagcctcacccccctcccccacacacacacacacagctccagagggaaaggtcacccctagccaggatggtaaattcttttcatgctttgtcattagctcacactacattggatactttccttggcacagttcagcagggacaccaggcaagccatttgccatacagacagtttctactcttggaattccacgtgggtccatcattatcagccctgtcctcatcatcctgaactcatgtccgccagttccttctggggtctagcaacttggggcacaggaggaagatggaagcctggtcatactggatgccagctatcctagagcacactggcacagcacttcccatgagccactggtcccaggttaggtgagagggagctctggtgggtaaaggagggagggacttggggcaggtataaaatggctgtcattaaaagggtccctgggctgagcttactgaagtagtttgctgtctctaccacccagatagcacaggctctcaaggcctgcacactgcacacactgacagtgtgagccagggtggggatggcagccactgtagtgtcaacagagcagaggggacatctatcccaagtatagatgctgaggaatagggagactgtggagggcaccatgttccctgggcttgagcagatagggactcacccagtgctggctcatggaaggtccttagcatccctctggccatgtgctcagccaccccaacatccctgtctggatctccttggcttcacacacacaagtcacatcccctacccaaagccctacagccctgcaggccttgggatcagactcctgctggaggtggaggcatgggtcaaagtgcagaggctgacaatcgtcagcagtgggcatcttcatctctgctgcgctggtccccagcacagagggagagggagctagagacggcacatgcacgtagcccataaatatgtctaaccgcagccagcacgtctaactgggcaatttgctttttaaaaaattgcgctctaattttaagtgaacagcccctaattatggtgatttgcaggcacctgggaaccgggtggcatttgaacacggcagaacagtgcagggactgattggcggggtgtcattcagcccgcacttgctgataagccaggaccacttcactgggtgggtctgtaccaggaggtgagcctacccgtgccaaggcgggcagggcaacgggaggagagagagagtgggagagggactgtggaaggacctaactgggccatgcccaacttgtgtacaaacctcagacttggttttgtttgagacttgcaaagagagacatttcctgcccctccaacctccagaaggacctgccaggacttgtactggccacaaagaggttccgtgagcagatacccaaccgggttggagtgggtttcatgtggcctctttagctcttgcctatttatcaggagaggcgagtggtgctggcagctgagacaggtctctttcagataaagaatgggtgtggtggcctgtcatctgagctacttggaaaacagatgcagaaggaccatagttcaaggccaacctgggtaacttgggagaccttctctcaaaataaaacaatattaacaagaggactggagtgtggctcagtggtagagcccctgcctagaatcccccagtgaggggctgggggtgtggctcagtggtagagcccctgcctagaatcccccagtgagggactggggtgtggctcagtggtagagcccctgcctagaatcccccagtgaggggctgggggcgtggctcagtggtagagcccctgcctagaatcccccagtgaggggctgggggtgtggctcagtggtagagcccctgcctagaatcccccagtgaggggctgggggtgtggctcagtggtagagcccctgcctagaatcccccagtgaggggctgggggtgtggctcagtggtagagcccctgcctagaatcccccagtgaggggctgggggtgtggctcagtggtagagcccctgcctagaatcccccagtgaggggctgggggtgtggctcagtggtagagcccctgcctagaatcccccagtgaggggctgggggtgtggctcagtggtagagcccctgactagagttctctagtgaaaggactagaggtgtagcttgatgttagggtacttacctaacctgtgtgatgctctgggttccatttccagtaccacacttagacagacacacatctggggaggggcaggggagacatgacacccagaagttcctgctgaggggacccagaccatgggtgggctgggacaggaaagaaccctggaggttctccttccacccctaacccacccccacccagccagctctgcctgctccttcccaaacagctgcctcagagtcagcccctgtgacatttcaggaaaaacattgcgagtcgagagcagaagggagaaatgaaaggattttctcaagaaaaggtcagagtggtttctcttatttttgtttaaagatggtttgtgttgaactatgacaaggctaaatgtattaagggccatgggaacaggctgggggtcggcctacgtgagaaaacaggaggaaaacccaggtaacaagcaagacaggagacagcttggggaagcagtgagacagagcctcccattccctgatggcccttgagggatggggtgaaagggaggtgggggcctcagcagctgcagtctccccaggtcccctcttgttcatgctagggagtcagtggcagtcacagagtgccaggacctaagggaacagcctgactatctgtgtgactctcaggaatagggtcacctgcagagccgctggcaggagggacctctcagaacaaactcctagatgccttgagccatgcatccaggtcctcattagcacgcccactatgcattgttcattcgcacaggctaaatcacagagaaacactatccccaaagcaggcattctcagccctccccgtggtacacaccaccagcctcctgccactgccctgttgtcttgtagagacgcctcatgccaatggcaccacataaacagcctactatgtgcaaagtccctagagcttgttccttttcatggctggattatttattcacatatgtgtagctaaactgcactgtgttcatccctgcatccctgcaggtcatgtcactgtggacattggtgtctaggtggcctgggagcactggagggacagcagtagatctcatgaccatgtttgggcactgcgaggctcgcccacaggaactgacagctgccagtgattctcagctgttctgacttcttctcatccttcccatgcctgcctttcctcagacggctcttctgatgggctctggcctggtttacaaccccagagacccacttccttctgtcagacccccatgcttcttctttggagaaccagctaatctgctctgctcctaattgggccctctgtctttctgagtcttaagtggggagggctaccccactcagacccaaggtttgcgagtggtcctatgtggagttgtgacttcttgcctggccttgccagaaggggcttttctcttctacccaagtggtccttctatattttgggccactaaggtatggctgggcaaattggcaggggaggccccaggataagtgagcgttgggaaaggaaggatgacgggaaggcccaggggctctgtctgcttctcccagcccagcctgcatagtgaagggtagcctgcccagacagcctgtaacctgggcaaacccagggaaactgcgctctgtacactgcagctgtgaccctggctgtaagctgcaaacccacctccccttcacagctatcgatcgcagagccattgtgtcctcccttcagttacacatgacataagaaaacagggcaagatggtgggactcatggctctagctgcatttgtagcagagaatggcctagttggtcatcaatgggaggagaggcccttggtcctgtgaaggttctatgccccagtataggggaatgccagggccaggaagagggagtgggtgggttggtgagcaggcagaggggggaagggataaggggtttttggaggggaaactaggaagggggataacatttgaaatgtaaataaagaaaatatctaaaaaaaatttaaattgtcaatcaatcaaacagggcaagaatcagttagagctccagagttcaccgtcagggctaaacctccatctcaatgcccagcatcctggcttcagcctggaagatgctctgggcttgcttcacctcaccaggtcaggcaagaaacagctgaggatccaggtactggaatggaggtccccaggaatctgtagcctgttgtagttgggatagtcctgaggcaagactggctccctgctgtgaatctcagttccctctgccttgaactttgcctcagtgggcagctcaagcctactgagtgcatgaagcaagccagggcccctgtagctcaggctccactctagtggcaggcaacaagctttccacggggggagcatgtgaggacagacacctgtccaatagccaccgctgactcaactctcttctctcctcctgcaggccacaggaccctcgggctccaagatgcagctgctggagacagagttctcacggtctgtgcctgagctcattgaactgcacttgctgcagcaggacagcatccctgccttcctcagtgcgctcaccatagagctgttcagccgccagacctctatctagcctcttcccatgagcatcttcactacagccgctggacctcggcctagcctgtacctgcagcttctcacatgcagcccccagaccttgagctagctcttggtctacagttgcccacatcatccccagatccctttgccacccatagctgcatcatgtcacaaacactagccgtggcctctgctcaagcagccactgtctcttgtccctggctaggagcaagctactggggatgaccaagccagatcataccccactactctcctccccaccccaccccattctagagccgctccacgtactgtcccaaggtgtaccccagcctccagtcccatgcgctggttgcttaggcttcagtggccagactgtagcctgtgtccacagtctcagactaatgaaataaagtgctacctttatcttccttcccggattgtgtccaaggctccaagctacctctctgtccaggcctcaccacactgtactgtgcttacctggacggccggcaggcctgctcatacacacagcctgagaggcagatggggtgggagtgctcaagtcccatccctctgagccggggtatctcactccctgccttggttccttccctgcctctcccctgccggaggtctctgtgtccagtgggtaaccctcccttgccagctccctgcaaggggccccaccaggcccagccatctgtaccacattcaagtgtcctggttaacaggttttctttagcagaggtggagaggagggggatatgtctggattgtcctgagagacaaggcacctgagtgtaccatacccccttcacatgcctgcaagagaatggaaatgagacagcctgccgggagcactcagacttgggccagagaaaattttacttgtggcagcacccccacccccaccccctccaccctcacccaccccggcttacaacagctcctcactgggcccccactgataaatgagtcttaagctgctaatgactcactttaagggattagtggcatggtgacaagcgtcacagccaggaggtaacaggatttgctgtgtccaggcctccagctcccctaccaggggaccccacccccacccccagcagcctccaccccctcctgtcacattcagctggagctacaaattcacccacggctgagctctttattgcctggtgcaaggccctctgggatgtacaaattgtgggtgtctctccagctcctgacccgtcccagggaccaccaggctgttcagaggccagagtgaaggtaaccagggcagcctcagaatcgacctacttagagtccccggcagcggggactggttgcacctagctgaactatccagctcatagctggctctctcccatgccaaactggcctttctctgatcacacctttccagctgagtggcatcagactgcaggttaggaatgaaggagtcctgctccagagtcacctgtgggtctagcttcagagtcagacatggatggtccccctgcctcccagcatcccaggtcaagcacaggctgtctttatcctcacacgggcgggaaaggaagactcaaaggcccaggagctcccagttgagagcacaagcatgcataatacacatatgcacatggtgcaccattacacatagaagttatgcaccctatgcacatatgaggcatgtgcttgcatatggaaacatgaatcataactgcatatgtgtgtatatacattagtgtacttgggcaccggctctgcatgcatgagcttgtgcacatgcgtgtttgcaatctgagtagtacttctgcccagagagggatgtgctgcagatagagagagagagagagagagagagagagagagagagagagggagagagagcactaacaagtgggagcaaggagccccagcaaagtctatatttataactgttttctggttaactctacaatttgaatacgttcttcttatcattaaagcaaaaactagtaaacccccaaagaggcaggcagtggaggaaggagaagcccctcccttggctcccagccagcctcccagcctgaagggcagacctgcatgcctctgcgtggatgggcgagagcgcccaggtttgtttcgtcagactctgtacaggagtctttaataactgctttgttgtacagcttggtttttcccaacaactgtccagccactgggtttcatggttgaatctgaaagacacaaatctcgaaggttctcatagggcttcttgagaaacagaaacaccgactcctcggtgacagggaagcaagctgccagcaactcccggggctgttgcatttcagcaggggtgtgtgtgtgtgtgtgtgcagcacatgtactacagagcacaaatggaggtcagaggacaaatatgccagagttagttctatccgtcctccatgtgggtcctagagattttaactcaggtaggtcatcaggcttggcagcaagcacctttaccccatnnnnnnnnnnnnnnnnnnnnnnnnnnnnnnnnnnnnnnnnnnnnnnnnnnnnnnnnnnnnnnnncccccaccccacccccgtgcctgtctttaaagcaaatgaatagccaagttccagggcctggttaaggagcatcttgtatggaatcagatctgcccatgtgttagctgccttaagctgcaccacagtgtccttcactagacatagcctcagaatgaggtgaggtggagacaggaggattgcccaggactctgggcagcccgcctagcccactcaccctcaagttgctgagagacctgtctccagcaatgaatcaataaggtgagtggctcctgagaaaccatgcctagagttgaattctggcctctccatgtgcaaatatgcacacacatggacatacacacgcatggatatgcatgtgcatgcagaggcatacaaagagttgatcagaacacagacacacagatggatgaccccttgaggacccaaggagaagtatctacagtccttgaccttgggctgggactttgtatgtgtcattgagtatgtgtcattgaagctgaggtcacatgggtcccacctcgccagccaggctgcttcgtttttccctgtgacatttatccccaccttgcattctgtttagtgcattgcttataatatgcatatatatgtagggagatattttaatcactctcttctcacctatggaacagtgctgtctcaatgaaatgtcatgtcggtgacatacatcatttgcaatgttcaatgggagctggagagatggctcagtggttaaggacacatacctatcttccagaggacccggaacccatgtcaggtggctcacaaccacctgtaaccccagatcagaggatctgatgtcctcagctggcctccatgggccctgcattcacacatgcatacccacacatgggcatacataacgttagagctataatcaggaatgtttaatagccacattaaggaagtatgaagtggagctattacgatgattccgtccgcggcactttgctgcgatgtgagtttactcagattccacgttgtaatcccattgttcctaagagataggaaaagtccctaaaacagtggttctcaacccgtgggtcatgacccctcaggttgagcaatcttttcacatgtggtcacctaagaccatctgcatttctgatatttaattatgactcatgacagtagcaaaaatacagttatgaagtagcaataaaataattttacagttgggggtcattacaatatgcggcactgtattaagaggtcacagcattaggaaggtggaaccactgccctagaacttgcatgctagccagctattctggcatgtgcagctataactgtaattctttggggggggggtcaacatccccttttgctcccaaatcattgcaaggcttttctgttccctgttaaagcaaatgacgcagagacttggtatatttgttaacaagcttcaggcctaagctcacatgttctgagctgttcttcctgtccacatggtcctttgcctttaatctgagtctggccttggcttgctctggtggtccatgtgtcctctggtccatgtgtccttatgcctgctctcccatcactatctcaagaatcctccttttcacacggtgtctcctctcccttctcttccactccctctttgctctctctgggacccctagactagaattggaagtcccaccctatcctcttctgcccagctaattggctcatcagttcttttattaaccaatcaggggtgatggaaaagagtatttatgtagcatagagacccgagatggttgacctcaaccagatactgctacaagatgaggcagcggggtcatgagatcaaggacagcctgggctacaattacatcatttagcactgcatatcctaagattggaatacagaagttagtgtagttcttgcccaaggatgttgtgcaaattagatccaggtgtatgtacacacttaggagcccagccgtcaggaagctgaggcaggaggttagtgaattcaaggccagcctgagctacatagcatagactgtactacatagcaagaccttgtctcaaaacaaaccaggaacagaactggggatatggcgtagtaggcaaagggcttgctatatgcaagcgcagaggttggagtttggatccccggaccccaggtaaattacggggagtgccttgtatgtccctgagggcccgtttatcctggaatcactggctacccagccaagctgaatggatacgatcgtggttcaatgagacagtctttcaaaaattaaggtggagagtgattgaggagggcctgccagtgccctctggcctccatggacatgaacaggcgcatgtacccacaaactgcacacatcccaaattaagaaacaaaacaccagagacaagacagtaaaaaaggcactgaaattaggtttcagatatgttttttggttttttttgttttttcattttttttgttttttttttgttttttgttttttgtttgtttgtttgtttgttttggtttttcgagacagggtttctctgtagaccaggctggtcttgaactcagaaatccgcctgcctctgtctcccaaatgctgggattttaggcgtgcaccaccatgcccggctcaaatatgttttatatagcacaatacatccaaaaatttcccatttcagcctgtgatcagtcttttaaaaaaaaaaaaaaatggagacacgggttagtctttgatgttactgggtcttcgaaactgaggtgtctcttccactttttgcccacctcaggttaaactagctgcactcgggccttggtggccatataaatggtcatatgttctctgtgggctccacggcaatagtcctggcttgtcaggctctgtggacgctcaccgggcaggccatgttctcagaaagaagctgtgtattcttcctgacagacagaagccaaagagaagtcttagagcttctaccaccttaataaacactgtggtcactagcaacttgggcaggaaagggtttctttccgcttacagtctgtagtccatccaggaagtcaggcggcggagaggcgctgcttactggcttgcttctcatggcttgctcagcctgctttcttatagcacccaggaccaccagcccaagggtgggtagcatcacccacaataggctgggacctcccacatcaattactaattttaaaaacaatgccccacagtcttacctactggccattttggctgggccatttttctcatttgaagctcattttcctggagcttatgacaagttgacctaagactagccagcacacatgtcacctgtgtacagtgacagagtaggcctgctcagggattgaggggacacgatgactaacctatgttagcacttaggggtctggagggagtagtcagtgttttatggtccttctgacccaaaccatgggttcttccaactgtgaatgcccaagcccagacatcagaagcctcctccgttccatgctggcttagcatcagccttcctttgtggcctcagtcaccacacctggaaaatgggctaagagcaggagggaggggtgtcaacattatctcagaatcagcttggcagcaacctccagtatcatcccacaattagcccaactgccaaccaccaccaaaccttttccctcttccttttttatattatacttaaaatagaaaattaaattttacacaaggtttacaagctgttaacggaattcactaatcaaaccccaacacccaagtccttgaaaatgaaaatttaaaaggtctgcatttgcatattcatgttcttaatagggttcagaaggtatatttgcagctgatgaaaaggattaattaagcctaatttgcattggtggccctcttaaccctttatgagctcgaccagagacccaggggttgccatagccccagggcagcaagtgagagatgccaatcctggctgcccctcccttggtggccacaaaacctacacagtcacgcagccctggaagccagagcctcctccaggagtcagtgatatgcagtgctgtaggaacctctgcactggcactgagagccaaaaaccagactggaagaccctctcagctgctcactctgcggcaggatgcaggcaggacaatgggaaaagtgtgcgtgcgtgcgtgcgtgcgtgcgtgcgtgcgtgcgtgcgtgcgtgcgtgcgtgcgtgtgcgcgtgcgtgcgtgcgtgcgtgcgtgcgtgtgtgtgtgtgtgtgtgtgtgtgtgtgtgcttgtgtgcatgcattgtgtaagctgaaggtgttggcatcaggtatcgaccacaaccactccccaccttagactttgttttatttcattttgacagggtttctcagcatagccctgactgtcctggaacttgctctgtagaccaggctggcctcaaactcagagatccacctgcccttgcctcctgagtgctgggattgaaggcgtgtgccaccaccgatagttttgagacagggtttctcattgaacatggaactagactgtctggccagcaaaccccagacaccctcctggctctatcgtctcagctctgggattacaaattcatgccactacccttgggtttttcacgtggattctgaggcttaaacgcacttgtgtggcaaacgcttcacccactgagccatcttcgactttagttttctttgttgttagtctatatgttgagacagggcgtgtgtgtgacagctctcctgggtgtacactcaagtcatatttgtgtacaggacagtagtatacttgtgtgttgttgcctatgtttcacatgcacatatatgtgcatatatgtgaatgtatggagttgtcccctgggcctgtggcaattgaatgggctgtctctgcagtatgacacttgttgtgacccagatcttagtgacaaatacatggagctaaagacacggggtgtatgcaagatctgtacctaagccatgtatttacataaagttattggcacaacatatgtgcatatgtgccaatatatgtacttgagttgtgtaccttactttcatccacagggttattagtacatatgtttatatttatatatacatatgtatatgcagctacaaatatgcatatacacattaagtatacaatgtagatacttataaaaacatgcacataacactagatacatagttctacattcaacataataccatatacgtgcatactcaggtatttgatgtgtgcacacatagttacagatacaatgtatttagaattattgctttgctctttgtctgtatgttgagatagggtccctgtatatagcctaggctcacctcaaactcacaattctcctgacccagcttctggatattgttgagtacaggcatcactttatctgtgtcattgaggtaggtggtgacagctgaggtttttttgacacaggtggatggatgggtggatggatgaatgatggatggatggatggatggatggatgggtggatggatggatggataaatgaatgggtgaatggatagatgagtgggtgaatagatgaagggatagtttgatgggcagatgagtgaatggatggtggaattgatggatggatgaatgcatggatgtatggactgatggatggatgcatggatggatggtcagaaaagcacatttgttcataatacacatacacttgagcacagagaaatatatacagcacatatatatctaatatgtgcatagagtaatgtacagacacacacactatgaataagtcattagatgggcatcagccacactgatatagagtgtgtgtgtgtgtgtgtgtgtgtgtgtgtatgtgtgtgtgtgcaatgatttctcccaggcaccaggctaaggctgtccatgctggtttgaattacttgtgtttgcactaaattatggctccagtaactccgtggccttacatctttagaagtgctggctctgtggccgcagggcgctctgctatgtgcctcgttaatctgatccccttttgcctggaaattagaccatttgtttgccttttatgaagattattccccacgattatgagcagggctgtgggaagctgcaggagcctctggctggtgagcaccagtcactttggaaatcagaggaggaggtgggaggcagtcggaggttcccattctccaactcacacaggagcagccagggcaggggagaaactgaggcacaccaatatctgtgaggctatgagttgggaggtagggaatcttgcagtgacaaggatagctggggccaggggcatggcttagtgtgggactaccccagaactggcataaaaagctgcctgtgatagcttatgtctgtaactgcagagctggggagggaggtacagaggctgaccagcccagccaaatcagtgagctccaggtgcaatgagagactctttgtcccccaaaatgaggtggggagctggaaagttccccactgtcaaaaagcactggcctccatcacatatgaacatgcgtgtacacacctgcacgacaacaggtacatagaccacacattcacaccaataaataaaatcaaataataaatattaaaacaaatatcatctacatggtgatgcctcaagtccactacccaggcccgccccttcctggactgccgcccagggcttccctactctctgctctgcagttcagtaattaagatggttctgtgcagatgtgatgatccagaaggaaaaccaaaggcccagaggcagccccgctcccacgtggacgcctgatttatggcagtccaggcacacccgggagcgaggaaactgtttaataaatgctacggagaccaacttcatggttttcgggggggggggggtgcttttgtttcattttgctttgtttgggctttttgttgtagtagttatagtagtagtagtagttgttgttgttgttagattagtttttgtttgttttgattttcatatttttattttgtttctttgagattttttttttccagaaagagggagggagaaagagaagctggaaagatctgggagaaatttaaaattaaattctccagcttctctatgccaccatgcctaaactaaatgtttgtttgtttgtttgttgagacagggtttctctttatagccctggctgtcctggaactcactctgtagaccagactagccttgaactcagagatctgcctgcctctgcctcccaagtgctgggattaaaggcgtgcgccactacggccagctaaactttgtgttacttctgttgttgcatgtggcacagcatgcatgtggaggtcagaggataactggagggacatgactctccttccactacattggtcttgggagtcaaattcaggtcctcaggcttgtcagcaagtgtctttannnnnnnnnnnnnnnnnnnncccacacacagggtctctcactctacccagagctcatctattcgactacattggctggtcaccaagctctgccacgcctcctccttggctcctcctccccagcgttgggattccaagccggcaccaccaagagcagctttttatgcggggagggggaggtgctgttgactgagcccaggtcctcacatttgacaagctctttacaaacagagcgtctccccaggcctgaggtgcttgctttttcactgcctcccctcccccacttctgttagttttggttttttgttttttgttttttttttgttgttgttgttgttgttgttgttttgcggtgagcaaagtttgcctgttcacatagcgaaatttgtcaatcttgtgttttacagtaggccctccttgcgtctgacttaagcaggcctcccctccacaggaaggacacagaaatactctcccaccgtcttccacaagtgacttttatttatgatttgaggctgaaatt

SEQ ID NO: 924 - DNA, 2638 bp, Mus musculus
gggagatctgagcggctgctgcagcaccgggctcctcaactgagaaggaggctgaccatggaagacctcggggagaacaccacagtcctctcctccctgagatctctgaacaacttcatttctcagcgaatggagggaacatcaggcctggatgtgtccacgtctgcctcagggtccctacagaagcagtatgagtatcacatgcagctggaggaaagagcagagcagatccgctcaaagtcctacctcatccaagtggagcgggagaagatgcagatggagctgagccacaagagagcccgagtggagctggagagagcagccagcaccaatgccaggaactacgagcgcgaggtagatcgcaaccaggagctcctggcacgcattcgacagctccaggagtgtgaggccacagcagaagagaagatgcgggagcagctggagcgccacaggctgtgcaagcaaaacctggatgctgtcagtcagcagctgcgggaacaggaggacagcctggcttcggccagggagatgattagttcattgaaggggcgtgtctcggagctgcagttgagtgccatggaccagaaggtacaggtcaagcggctggagtctgaaaagcaggagctgaaggagcagctggagctgcagcagcggaaatggcaagaggcaaatcagaagatccaggagctgcaggccagtcaagatgagagagctgagcatgagcagaagattaaggacctggagcagaagctgtgtctacaagagcaggatgcagctgtggtgaagagcatgaagtctgagctgatgcggatgcccaggatggagcgtgagctgaagaggctgcatgaagagaacactcatctaagggagatgaaggagaccaatgggctgctcacagaggagctggaaggtctgcagaggaaactgagccggcaggagaagatgcaggaggctctggttgacctggagttggaaaaggagaagctacttgcaaagctgcagagctgggagaacctggaccagaccatgggcttgaatctcaggactccagaggacctttctaggttcgtggttgagctacagcagcgagagctcaccctgaaggagaagaataacagcatcaccagcagtgcccggggtctggagaaggtccagcagcagctccaggatgaggtccggcaggccaatgcacagctgctggaggagcggaaaaagagggagacacatgaggcacttgcccgaaggctccagaagcgcaatgcattgctgaccaaggagagagatggcatgcgtgccatcctgggatcctacgacagtgagctgacccaaactgagtactcaacccagctgacacagcgcctgtgggaggccgaggacatggttcagaaggtacatgcccacagctcggagatggaggctcagctgtctcaggccctggaggagcttggggttcagaagcagagagctgacacgctggagatggagttgaagatgctgaaggcccagacaagctcagctgaatctagcttctcattctgcaaagaggaggtggatgcactcaggttgaaggtggaggagctggagggtgagcggagccgtctggaacaggaaaagcaggtgctggagatgcagatggagaaactaaccctacagggtgactacaaccagagtcgaaccaaagtgctacacatgagccttaacccaatcagcatggccaggcaacgccagcatgaggaccatgaccggctgcaggaggaatgtgagcgcttacggggacttgtgcatgccctggagagagggggccccatccctgctgacctggaggctgcctccagtctgccctcatcaaaggaggtggcagagctgcggaagcaggtggaaagtgctgagctgaagaaccagcggctgaaggaggttttccagaccaagatccaggagttccgcaaagtttgctacacgctgaccggctaccagattgacgtgaccacggagagccaataccgcctcacctcccgatacgctgagcaccagacggactgcctcatcttcaaggccacaggaccctcgggctccaagatgcagctgctggagacagagttctcacggtctgtgcctgagctcattgaactgcacttgctgcagcaggacagcatccctgccttcctcagtgcgctcaccatagagctgttcagccgccagacctctatctagcctcttcccatgagcatcttcactacagccgctggacctcggcctagcctgtacctgcagcttctcacatgcagcccccagaccttgagctagctcttggtctacagttgcccacatcatccccagatccctttgccacccatagctgcatcatgtcacaaacactagccgtggcctctgctcaagcagccactgtctcttgtccctggctaggagcaagctactggggatgaccaagccagatcataccccactactctcctccccaccccaccccattctagagccgctccacgtactgtcccaaggtgtaccccagcctccagtcccatgcgctggttgcttaggcttcagtggccagactgtagcctgtgtccacagtctcagactaatgaaataaagtgctacctttatcttccttcccgga

SEQ ID NO: 925 - protein, 711 aa, Mus musculus
MEDLGENTTVLSSLRSLNNFISQRMEGTSGLDVSTSASGSLQKQYEYHMQLEERAEQIRSKSYLIQVEREKMQMELSHKRARVELERAASTNARNYEREVDRNQELLARIRQLQECEATAEEKMREQLERHRLCKQNLDAVSQQLREQEDSLASAREMISSLKGRVSELQLSAMDQKVQVKRLESEKQELKEQLELQQRKWQEANQKIQELQASQDERAEHEQKIKDLEQKLCLQEQDAAVVKSMKSELMRMPRMERELKRLHEENTHLREMKETNGLLTEELEGLQRKLSRQEKMQEALVDLELEKEKLLAKLQSWENLDQTMQLRTPEDLSRFVVELQQRELTLKEKNNSITSSRLEKVQQQLQDEVRQANAQLLEERKKRETHEARRLQKRNALLTKERDGMRAILGSYDSELTQTEYSTQLTQRLWEAEDMVQKVHAHSSEMEAQLSQALEELGVQKQRADTLEMELKMLKAQTSSAESSFSFCKEEVDALRLKVEELEGERSRLEQEKQVLEMQMEKLTLQGDYNQSRTKVLHMSLNPISMARQRQHEDHDRLQEECERLRGLVHALERGGPIPADLEAASSLPSSKEVAELRKQVESAELKNQRLKEVFQTKIQEFRKVCYTLTGYQIDVTTESQYRLTSRYAEHQTDCLIFKATGPSGSKMQLLETEFSRSVPELIELHLLQQDSIPAFLSALTIELFSRQTSI

SEQ ID NO: 926 - DNA, 438405 bp, Homo sapiens
  misc_feature (1)...(438405): n = A, C, G or T/U
caagaaacctagggatacagaaagccctctgtccttgcgataaggcagggagtctaacagctgactaacacaagccacctacaaggctaaactgaaagagcaccctctaacacatgcctgctggggcttcaggagctgcaaacattcacccctagacactgccgtggggtgggagcccctcagcctgcctgtctgtatgttcccctagaggcttgagaagcggggcactgaagaagtgagccacatcctcatcgcacgcccttcgaggaggacaagggaacctttcccatttcactgagactgggtcctggtggcggaggcaggtcagacagggtaaatgggtttgtggcttagtttcacaccaggcccgtgtactttgtcccgacactgatctgtttctgccagaagccacggtttccaaagtaaatttttgtgatttactcctggtctcccccaagcctccgccccgctctccttgtctctctcccaaacccccggccccgctctcctcgtctccctcgagcccccgaccctgctcttctggtctccttcgagctcccggccccgctctcccccaagcccatggctcagctcccctagtctcctgccgcccgctggcccggctcccctccctggtcaccacgactcctggaatccccgcgcgcgcttttcgtacctgcaccgccgcttccgggggcgtggcctctgaccggaagtgaggccaggcacttccggcggcgcgctgcaggcgcggggaacaccaatggcggggtgagctgggcgctgctgctgcgcgtgcagacagcgggagtggttgggggtccgcccggtcgccttcctcggtcctggcctcggggctgggtgccgagcgctgggcaccgtccccgcactcagcgagcgcgacaggggcgaggccaggattccgggtcgcagttccccgggaggagggcgccctcaggtctccaggggcagggccggcggggccgtggggaggccggggccggcggcggagtccaggtggggggcgcagcgccggggcccagatccaaggcgccgggggcgagcccggggcgggatttcgcttctgggccgggtagctccattgcccgcgcttcctgggctgtcgagtgggccctggcccccgggaccggcttgtgccattttcccgggagaccccttaagcgaggggaagacagcgactcacggtcagcagtcagtgcctcctggcttgtcagcacgctttggtgttgcagaagctagaagctttggccttggagccatgagggtggtaacttttatttatttatttaaatcagaaagatggacatagagaccgggcttggtggcccacacctgtcatcccagcactttggaagtctgaggcaggaggatcgtttgagcctaggagttcgagaccagcctaggcaatgtagtgagatgccatctctaaaaaaggtttttaagaattaaaaaaaaaaaaaaaattagcccaggcatggtggtgcacacctgtagtcccagctactcaggaggctgaggtgggaggttcacttgagacccagaggttatggcagcaatcagctgtgattgtgccactgcaactccagcctggatgatagcaaaacaaaaatggccgggtgaggtggttcacgcctgtaatcccagcactttgggaggccaaggtgggctgatcgccagaggtcaggagttcgagaccagctcggccaacatggtgaaatcccatctctactgaaaatagaaaaattagccggaagtggtggcacacacctgtagtctcagctactcaggaggctgaggtgggaggttcacttgagccccagaggctgtggctgcagtcagctgtgatcatgccactgcactccagcctgggtaatagtaaaaccctgtctctaaaaaaacaaaaagaagaaagaaaaatgcctgggtgcagtggcttacacctgtaatcccagcactttgggaggccaaggcgggcagatcagcggaggtcaggagtttgagaccagcctggccaacatggtggaacccatctatactgaaaatacaaacattagccggacatggtagcaggtgtgcctgtaatcccagctacttgggaggctggggcaggagaattgcttgaacccgggagtcggaggctgcagtgagctgtcactgcactccagcctgggcgccagagtgagactccgtcttaaaaaaagaaaaagaggacatagaacttccttggtgaggttgttgtcagagttaaacaaggggaggtgtgtatagcttccacctgcttagctattgtgggctgtgaataaattgttacatttattgtaacaattgtctagagaatcttggaaattgtccttcaacgattgacacaggtttagttcaattttatttaagacatgtaggtgagaggattgtttgagcccaggagttcgaatctgcgttgaaccgtgacctcaccactgcactccagcctgggctatagagcgagaccctgtctcgaaaaaaagaagaaaaaaagaaatgtgacaggccagaccctctgtactagctgtcaaagccctggaactaggtcactaaggcaaggatctgtccttatgaggttttcttgcagcctgtcagagcccaatgaacatttttgccagatgagaaaataatattactttaattaattaattgatgtatttagttattgtttgagacggagtctcgctctgtcgcccaggctggagtgcagtggcgcaatctcggctcactgcaacctctgcctcctgggttcaggcgattctcctgcttcagcctcccgagtagctgggtttataggcatctgccaccacgccaggctaatttttgcattttagtagagacggggtttcatcatgttggccacggttggccaggctggtctcgaaatcctgacctcaggggatccacctgtcttggcctccaaaagtgctggaattacaggtgtctccgaatacccccatattctgaggtaccaagggttaggacatcaacacattaattttgcggggacacagtttggcctgtgatgcctgctttccatctgtgtagccttatcagttcacctcccctcctgggccttggtgccccatctctagaaatgaatgagttgatccgagggccctcccagctcatgacctgccgttctgtgtgatgccaacctgcctgctcctcttctctcccaccaggtacttgaagctggtgtgtgtttcctttcagcgtcaagggttccacactgttgggagtcgctgcaagaatcggacaggcgctgagcacctgtggctgacccgacatctcagggacccatttgtgaaggctgcgaaggtggagagttaccggtgtcgaagcgccttcaagctcctggaggtgaacgagaggcaccagattctgcggcccggccttcgggtgttagactgtggggcagctcctggggcctggagtcaggtggcggtgcagaaggtcaacgccgcaggcacaggtgggcctctgcactgctgttggcaccttctggctcccctgaggctgagtgggcatgggcaagctgcctttgccagtggatgcgggatggtggagcccttttttgaaggcgtgtgcttccgagtgggtggtttagcaatggtgatgataaaaataggatgctgccattttcaaaatgaaagacaaggtagaaaggtgcagtgaacatggaaatcacctcgcatgagaccgcccgcaggtaccagcaccagcatggtggtgtgcatccttccaggcttgtgcatgcatagatccctcacattttcaaaagcgatgttgtgccatacttttcttgctaatttgcagcctattggagctatttttgcttaatgatacatacatatatgtattatatatatatatatatatatatatatatatatatatatatatatatatataattattattgttattatttttgttcttcccccccctccagatggagtctcactcttgcccaggctgcagtgcaatggtgtgatctcggctcactgcaacctctgcctacctggttcaagcgattctcctgcctcagcctcccaagtagctgggattacaggcgcccgccaccgcacccagctaattttttctttttgtttttttaagtagagacagggtttcactatgttggctaggctgatctcgaactcttgacctcaggtgatctgcccacctcggcctcccaaagtgctgggattacagatgtgagccatggtgcccggctactcttaatgatgtattgacatctttccccaacagcacagctaaatttccaagtcgcataagccctggggctttcctggtggccccactggggctgctccgtccggaacctagaagaggcttcatggccagggctatggattctttgctctggatgaagctgagacacagttttcatctgttttgtatcttagggttttgagtaagattttctatataaaaaggttctcctgaataatgagatcagccaaccgcccatgcaactgaagacactgtcgtcattgggaaagtttcatcctattccatgtagtgcttgcaccgtaggttctttaaccagctccctcactgtggcatcaaggttgcttttggcttttggctgggatgcgtgtgctgtggtgaatatccttgccatttatgtttcctgctgtaaagccagggtagctgcatgcactggcatttgaacagggtgagacagtccacccagagctctcccaagtctctcccaaataccttagagtagggacactggtccccatttattggtgagaaaacaggctcagggtttcatgacttgttgaaagtgcagaaatggaatgctggccccctggatctgcacatctgcctcgctgctggtttgcggtaggtttgccatgaactcttggtgtctacctgcatccccttgggtggcccctgcccatacttaggcggggatatgcctcttcgggcttttcaacagcattttttttttttttttttttttttgtttatagagcctcactctgttgcccaggctggagtgcaatggcgccatctcggctcactgtaatctttgcctcctgtgtttaagtgatttccggctaatttttgtatgtttagtagagatgaggttttgccatgttggccaggctggtctcgaactccaggcctcaggtgatccgcccgcctctgcctcccagcatcctcgaggtgcttcctggtgcttccatcgtggtcagcctgaaagcctttttattgtttttcagctcaacatttattgactaaataagtgaatttgtgttggaaatgtcagttccttttctcattgctgagcttatcaccgtggagtcctcctagtaactgatttcagtggtttctgttcccctaagtgctcttgagatgaagcaggagagtggcccagcgtgccttgtaggaggaagtgacagaaggagagagcgtgagcgtgatctgcctgggcttgtcctcccggaagtcacaagcatgcagccaaagctgtttgccttcggtggaaatttccgaaggttgtaacatactggatattataggagtgaaagctcaggagcataaagtgaggcgtgaggccgggcgcagtggctcacacctgtaatcccagtactttgggaggccaaggggaggatcacctgaggtcaggagttcgagaccagcctgggcaatatggtgaaacccccgtctctacaaaaaattagccaggtgtggtggcatgttcctgtggtcctagctccttgggaagctgaggtggcaggggtcgctcgaacctggggaagtcaaggctgcagtgagctgaggccgtgcaacggagtgaggccttgtctcacacacacacacacaaagacacacaaagataacttgctgatatttgagtaacaccagtttgctaaaactaaaaagatgcctttgtgtcaccttacgtaaaacaagacttgttgcctataactgatctcagcatctgcctccccctcttctcactctgtacctacattcaaagccccctcttcacaagcccaacgcccccatctccccaacagtcccctccactgaggagggccgtagttctgttgagaaattgtcagagttgataagctaagggtacagtcacagattttcttgttcagtctgcttaacagaaaggctgttccaacggtagggggagagaaagggaccgtgtttcattcctagtgtaaacattggaagtccaggtattttgaagattacctcatttttcaaaggcgaaacccctcagtcttcaccccaggaaaatgggacgcctcacgcctcattttagctgggtctcctgagtagctgagactacagctaatttttatatttttttgtagagacaggatcttgctatgttgcccaggctggactagaactcctgggctcaagtaatcctcttgcttcagcctcccaaagtgctgggattttaggtgtaagccaccacacctagccgatatcagtttttgtacgttattttatatctgttcattttcctcatctcttgacttgtttccagtagtttctacattgaaagcaattggattaagctggagaatggatttcttgatttaatccagaggcactttatgtactagtttattattttctttttctttttctttttcttttgagatcgagtctcgctctgtcgccaaggctggagtgcagtggtgcgatcttggctcactgcaacctccgcttcccgggttcaagcgattctcctatcttagcctcccgagtagctgggattacaggcacgtgccaccacgcctgcctaatttttgtatttttagtagagatggggtttccccatgttggccaggctggtctcgaagtcctgacctcaggtgatccacccgtgtcagcctcccaaagtgctgggattataggtgtgagccactgggactggcctattttctattttagtttatcaaaaagagcactcagagataagaaccctttcacagagagtgagccttgggtagtgaaatgataccagatttggaatcagaagtcctgatgcctggcacaggtctgcccatggctgaggatgactctaggacagtcacttcctgtctgggcctcagcttctcagatgttaaggcccgccatctccaccatgtgtctttataggatgtatagatagagaaggcctgtgtttacctatttgcacattagctctttgccttggtcttgacattttatttttatttcatcactttgttgcatgtactgtatttttgtaaaaagattcagggtgtaaataaataacacattcaccatttcttccatagatcccagctctcctgttggcttcgtgcttggggtagatcttcttcacatattccccctggaaggagcaacttttctgtgccctgctgacgtgactgacccgagaacctcacagagaatcctcgaggtgcttcctggcaggagagcagatgtgattctgagcgacatggcgcccaatgccacagggttccgggacctcgatcatgacaggctcatcagcctgtgcctgacccttctcagcgtgaccccagacatcctgcaacctggggggacattcctttgtaaaacctgggctggaagtcaaagccgtcggttacagaggagactgacagaggaattccagaatgtaaggatcatcaaacctgaagccagcaggaaagagtcatcagaagtgtacttcttggccacacagtaccacggaaggaagggcactgtgaagcagtgaggatttcttgtgccattttcataatggtcattagctccttttaagctagaaacgtagcctgagctcctgaagagttcctgggagatttgagctgattttggagatggagcaggacaagtggggagtctctctctctctttctctctctctctttttaaccaaaaagagatgacaaaactaagttcaggggccatggaaaatgaaaaagtccgctatattgtgatttgggaagagaaagttatcaagagaaagaggtgaggatggaaggatggagaaaaacagactgtgggaaggatcagaaggaatccgccgaggcagggatgggtgtgcccatgtgtgccttgacgggacttcatcttatagactgttaaactgtcacacacaaacaggctttccacccctgctctgagagcaccacgcacagatttccagttcttagtgtggctgtttaaagtagaaaatctgggggctgggtgaggccactcatgcctgtaaacccagggctttagaaggctgaggctgggggattgcttgaagtcaggagttcaagaccaacctgggcaacatagcaacaccccccatgtctacaaaaatgaaaaaccaaaaagcaaaccaaaagaaaaatctgaaatttccatctggggattaacttctgtctttctggtgaacaatatagcaattcacgcattcttcaagcagcaaaagttcccggaacaattagggaagacgtatggtctgaatttatccaggcagtgggtctgctttggtttttgctggaaatttatatcagtgtctgggctcccaagaacataaatgtaattgccaaagcaagcagtgatgtggtgtgtttattttcttttactcatctaggaacttgacgcagctttatatttaataaaataatagagattgcattattttaaggtactttcatgctttgaagttttgttttttttaaactggcttcctcaaagccatttcctggaggtgtactcatccctcaagaagagtttgttgactatgattaaattccaaggaccagtgggggaagtctggaaacccaggaatctccatcaggaatctggggctctgtccagctccccgaaggaaactgcgggtcagatgttttgatttttttttttctttgagaaacagaatctcactctgtcacccaggctggagtgcagtgaagtgatcttggctcactgtaagctccacttcccgggttcacgccattcggcctcagcctcccgagtagctgggactacaggcgcccatcaccacgcccggctattttttttttttttgtattttattttcagtagagacggggtttcaccgtgttagccaggatggtctcgatctcctgacctcgtgatccgcctgcctcggcctcccaaagtgctgggattacaggcgtgagccaccgcgcccggccgccagatgttttgacttttcattttatttctggttgcagtcaggttgttaagtccagggactcttgccctactccacctcgttctcttattccatttcattcccggggcacacaacttggaagtctttctctgaaagaaggaaaattcattgcagacccttaggaacagcatcttcttagagggaagccaggggctgggcagagacgggaggaggagaggaagagaatatggaaacgagtaaggcacactcttctcaggaaggctccaatttgaaggatagacaaaggttaccataataatggtggggcctgacctcaccccattggatgctgtgccctggcttgcagagcactgggaaggtagcctagtagcataaattgcatttctagtgggcccagaaaaaagcaaaataacggattgattcaagctgatactgagtagcaaaattttgggaagagtcaacggtgcaagtttgtccgaggaggctgccgtgggcgcggctattccacacattacggcgcgaggcgaaagccttagtggaagcgcgtcctgcgcaaagccggggggcccccgactgcgccttggctcagccttcggttccgagtcctttccgtgcggagtctcccaggggtggcggctccgggtgcggacgcggagtccccaggatcagccggtgcgcagactcggttctttacggcccgattgccacgcaggtctcgcgagagcgcaggcgcaagtgtcgcgataaatgggcgccggcggagcggagggagatccgagcggcggcggcaagctggctgcgagcggctgaggtaagcggcccggctcgcgcgggcggcggggtcccggggtcccgggggtcccgggaatggcaagggaggggccgagggcccggaccgggtgtgctcgccagggtggggcacaacgacccagaccccgtgcctcaggaccccgcgcccgccccgtctcccatgggcgcgctctcctctctgtgctctcccctcctctccccactcccctgtccccactccccctttgggctgtgctggggacagcgggcccctcgcctgggtctccgcagccgtcccttgtgccagggcgggcggccgaggggcgcgtgctcgtggtcccagccccggggtcccgctgcctaccgtgtgggtccccgggctagggtgccggcgcgccgaggaaggggcctgagctggcgcctggtggagaagtcggggctgcaggggctcttggcatcctggtggctcgcgccggtccgctctcaggaagggggcgtgtgggcccggtttcccctcggggatggcaagggccaccctgatctcgtttgggcaatggaggaattgggctgtggagcctccttccaggcgggcctgcctctgcggggctggcagcctggggagctcaggcctctgcttgcaccaggccaaggttcttgttaaatggaaactcagaaactgtgcagctgcagaagttctacctttggcttttaaacgcgcttggctgttccctagttgtggctggtgggccggcctgccatgagcccatagtaagcgccggtgttgggggtgcaaagttctttactgcggtttgtcttcagccttccaaagccagacagacccaagttccaatctccgttctgtaactttttgaagcttcggtttcatcatctctagaatctgtgtaaaaagacctaattcaccaccctgttgagactgagcttacaaatatagtgctggtcaacctgcagccgtattcccatcatctagcggtggaagacttgagggatattggccccgttccccacaactttgcaagtagatttcactgtcatgagtttacagatgaggaaactgaagttcaagaagtctcggtgctcggaaatgtcagatacctttctttctgatacctagttgaaaatagtagtagtacttattaatgtcactagaaataaacaatgaaaatgagcacagctgtgatgatcatcatctttactgtcactgttgcatgcctcgtttctgattcccagaggccagattttttttttaattaattattattattttttgaaacggagtcttgctctggcacccaggctggaatgcagtggcgcgatctcagttcactgcaacctccatctcctgggttcaagaaaatctcctgtcccagcctccggagtagctgggattacaggtgcacgccaccacatctggctttagtagagatggggtttcaccatgttggccaggctggtctcgaactcctgacctgtggtgatctgcccatcttggcctcacaaagtgctgggattacaggcatgagcaacagtgcctggcttatgtttatttatttatttattcattcatttatttattttgagacactgtctcaccccgttacccaggctggagtgcagtggtgcggtctcaggtcactgcaacctctgcctcccagtttcaagcgattcttgtgccacagcctcctgagtagctgggattacaggcgcacaccaccacacccggctagtttttgtattttattagaggtggggttttgccatgttggccattctggtcttgaactccggacctgcctccgcctcccgaagtgctgggattagaggcgtgaaccaccctgcctgggcaagaggccagactttgctgtgagtgctcctggtaggtagtttcaggcatcaactgactggattcaggaattcctagaaacctgggaaagcatcatttttggttttgggtgtgcctgttgagggtgtttccagaggagatgagcttgggagtctgagtggaccaggtgctgaagatccatcctcagagtcaggggcagtatctaagagcctgggggcctggagaggacaaaaacagagaaaaggcgaatgtgtccatctgcctgcaggagctgggatacactcttcctctcctctcctcaacagcagcactccaagctcgccggcctttggtctccaggacttgtcccagcagcccctcgaactgagaattacaccatcggacccctggctctgaggccttcagacttggactgtgtcacactgccaggcttccagggctccaacttgcagacggcctgttgtgggacagtctctgtaatcgcgtgagtcagtttccccaataaagcccttctcttgtgtctgtctctgtgtcctgttggctctgtgtctctggagaaccctcttacagtgcagttgggggacgtgccacctgagtgctgagccccgcctcccgggcgccagctgtccatctgtccatgtgcaactgagactcaattggtggcttgctggtggggatttggtggcatgcttccttgcttccattttttgtctggtaaattggcagcatggctcccagttgccattgaagaatgtggttacaggcatgggtgtattatgagctccaatgtgcgttaggggagtggggctgtccagaggctctgctgactgcacggctgatggcacgtggaaaggctgcccctgaccagtcctttgtctgtccccggaaggaaagcaaccatggaagacctgggggaaaacaccatggttttatccaccctgagatctttgaacaacttcatctctcagcgtgtggagggaggctctggactggatatttctacctcggccccaggttctctgcagatgcagtaccagcagagcatgcaggtgagtggcatgtgcctgggtgggagtctgctctggggagaccctgggcccgggcaggacctcttccagtcttctgtagttgaggtgggtcggtattagcagagcctagagacagctattcgtctcccaggtctcactatgggcactcctcattttggggtcgtagctggaggctagttggggccctgagccatcctggcttaaaggcctgccttgttagcgccctgagtgggcctggcgctcagcattgcgttcacacaagtgcactcacagaccctggtgacaggatcggaaagccagttcattcatctaattgaggacagaacccaaactgcctgggggagtgagcaccaggactgtcgggaaggctgtgttggaaacacagtgctgagagtgcctgggcagcccagagacaaagccacagcagtgagcagaaggactgggtgttttgtggtctcagactgtggagggccatttacagattttggggtgatttttacagttttcttctataaaatagttgtattttgtttcattacaagttcttggggtttctcactgtagacacaactgcagaggattcaggcctcctgaaggacttcaggctccaaagagtgatgagcccagtcccagttggggctgcgataacggggcccccaagttgtagggagtggtggggagtggagtgctggctagtagtgtctccagccttgcctgggccctgtggctgcgcaggctcctctaggctcctctgcctggaccctctttcccagtccctgctgcggtccccagagccgttctgtagttctgtccgcattagaggaggctctggcttcctgcgctctcagagcccagatgaggccctgctgcatttggttaaactgtgtgtgcgtgtgcatttgttttgttgcataattgaattaatgtgtgtttattagaatgctagcttgtggccagatgtggtggctcaggcctgtaatcccagcactttgggaggctgaggtgggcggatcatgaggtcaggagatcaagatcatcctggctaacacggtgaaaccctgtctctactaaaaatacaaaaaattagctgggcgtggcacctgtagtcccagctactcgggaggctggagcaggagaatggtgtgaacccgggagtcagagcttgcagtgagctgagattgcgccaccgcactccagcctgggtgacagagtgagaccctgtctcaaaaaaaaaaaaagaatgctagttgctagcttgctcactgccctttcttgatgaggactgttttttattctgagattaggtcatatatatatatatgtgtgtgtgtatatatataatatttatgtaaatgttcttttgtgaaattatgaaggtaatagatggtagttgttttttatcactgacaaaatgagaagtggccaactctgagctggttgcagtggctcatgcctataaccccagcactttgggaggctgaggtggctggatcacttgaggtcaggaatttgagaccagcctgaccaacatggtaagacctcatctctactaaaaatacaaaaattaggcgggtgtgggcacctgtaatcccacctactcgggaggctgaggcaggagaatcgcttgaacctgggaggcggaggttgcagtgagccatcgcgccactgcactccagcccgggtgacagagttggcaactctggtctgaaatgctgtgattttagtgttgcgaatgtctgggacctcttggcctgtctgtcaaagctgtgggattctagagtctgtcttggggctcggaggcccccagtgctcactggtaaaggcctctcggtgaggggatcagtgatggagtgcggtagtcagagcaaggtggtgagcggagtgatggcggcaagaccagccttggtccctggcccctgtcacatcccattcctggacttcgtcgtggttctctctctcctgctgagcccccggcgtggcagggagggcctggagaacatggcaggccgggggaatgtgtgctgtctggtttctcacacatcgtgttgatttaacgtaagggtaaactttcagggttcctttctttccgttgtagtcagctccaggcagaggtggcacacggatcaggtgtgtctgggactcctggtccctgccggtcgtgccccctgcaggcggggtgcccacccttctcgagaggctcaggcttgactgcagacacagaagtgagaccaggaaggctgctgagtttgaagggcagtcttaggaacgcccaaacagcagcagctgagaatcgagacacagtaacataggagtaaaggaagtgtgggcttgggccaccagagaacacaggtgggaggacagagaaacttccctcccctgtcccaggctttcctggccttggcacgcttggcatttgggctgggtaattcttttttctcaggactttcttgtgcattgtgggctgtttaacaacttccctggcctctaccccctggacgccagccagcagcagacacatgtgaccacccccctgtgacaatcaggtgtctccagacagggccagatgttcccaggggcaaaactggaccccactgggaaccaccactctactctggtgcttctcaacctttcatgtgcatgtgaacgccctgagaatgtgtctaaaaagaagtttctttttttcttttggagatagggtcttactctgtcatccaggctggagtgcagtggtacaatgttggctcactgcagcctccgtctcctgggttcaagtgattctccctcctcagcctcccgagtagctgagattacaggtgcgttaccaccacactcggctaattttcatagttttgagtagagacagggtttcaccatgttggccaggctggtctcaaactcctgacctcaagttatgtacccaccttggccccccgaactgctgggattacagacgtgagccaccacgcctggcctagattcttttgtttttttttttttgagacgaactcttgccctgtcatccaggctggaatgcagtggtgtgatcttggctcactgcaaccttcgcctcctgggttcaagcgattctcctgcctcagcctgagtagctggggttacaggtgcgtaccaccacgaccagctaatttttgtatttttagtagagacggggtttccccatgttggccaggctggtcttgaactcctggcctcaagtgatccacccgccttggcctctcaaagtactgggattacaggtgtgagccaccacacccaacctaaagagaagattctgactgagtaggtctggggtgtagtctgcgactctgcatttgttaagtgccgggagatgctgcactgcaaggctctgggccacgtgaagagtcagtgactctgccttttcctccagctgagcaggtcgtacccaaaggccggctctggaactatttggcaagtcttctggggctctttgaggctcagctaacctgtaatcactagccctgtgtggtaggcagacttctgagagggcccccaggagctcagctcacctgtaatcactagtcctgtgtggcaggcagacttctgagagggcccccagaggctcagctcacctgtaatcactaaccctgtgtggtaggcaggcttctgagagggcccccagattccaggctccttgtgcacactcaccttcctactgcctcccaggtttcagtccaatactgagtaggtttcattgctgtgggattgtgcagatgtaattaaggtctaagatctgttgaccttgagatagggagattacgtgggtgggcttgatccactccctggtgggcttgatgtactcacctgagccctttaagtctgagtccagacgtccgaggccgagcagtcaagagacatagcaggagagggatttgatgagggagattggacgtggttgactttggagatggagagggccgtgtggcaagggatgtgggcagcacctaggagttgatggctgtactgggctggcagccagtcgggaaggagacctcattctccatctctgagctccacgtgagaacatgtcctggccgactgcattgatttttagtctgggagaccctggtcagagaatgcagccacctacgtctggacttccgacccacggagccgttggctggtaaataaatgggtggcattcgaggccgttgccttcactaatatgcttaatgtcatctcaaaagacgtcttcctcttcccaggctttttcaccttcccgtttcctgcccctcccctgttccccagcctggagcccagtggctgggccacatcaagacttagcacgggacctgcgggaatgggtcctcagggagtgtgtctgctgcactgagtcactcacctggtttgatgccgtcactgaggattctgtttttctttgggtgcgacctgctcagctggaggaaagagcagagcagatccgttcgaagtcccacctcatccaggtggagcgggagaaaatgcagatggagctgagtcacaagagggctcgagtggagctggagagagcagccagcaccagtgccaggaactacgaggtgggttcaggcggggcgagggtcggcccagacagccccaggaagcaagggggctgtgcacggtacctgccaggttataagaaatcacatcctagtccctgggagcaagggggctgtgcacggtacctgccaggccgtaggaaatgagaacccagctggctggaagcctgacacgccctgtgtcatggttgccaggacattccttctgaggccactcatgctgtggggcaggtatcagttatgcttgatgtcctagaggagggtggcatgaaatgggaacacttgctgtgtctgttcattgaggctgcggtgctggcacagattcttttgctgggtctcctggtttcctcttccctctggaagaattggaatgcaggtctggcagaaatgccaagtggtgtaggagtgacaggcttaggaggtcatggggtggatcagggtctcgggtccatgctgggtcttggggttggagggccctagcaaagggtgccggtctcaatggcggctctgtgttgctcctggctccccagggcagcagggaaaacaccctgtccttggggagggaattaggtttccactgagtgcgcggatcccctctgctctgattaacagcactttgccagggtttcagtcagtgctgatcagttgtggaaatgctgccaaggttcaggcagagtattgggcggaaagtctccctggcctccgtgccctctcttggcgggtggatgtccagccccgccctgacatcatgcggtgtattcacacactctcctgggccctagaaaaatagctcacgtcttccggggtgtgatgctggttggattgcttgcccctggcctgcagatcctgactgcggtgtgcgttgtgtgggctcagtgagactgaggcaccgctggggtgggggccactgcctcagggttggctccgttgctgctttgagagctgttttccctgagaggtggggcgtttgctcatggcctgggtgggtcctaggagggacagtactggaggaattggtgggaaggggagggagagtccacaggagtctccctaactactgagattcccttgttaggggtggagaggagccaccaggtcattggtctggaggcagcatgctgatggtatggctgtggctgtcaggcaggagggacagtgtgcagctgttggagttcctctaggccgagagtccctgagggcagggcccacccgactctgcccaggatctccattgtgtggcacagcttatggcattttatgggtgctcacaaatgttggattgagggaggggtcattgtagggtctccgggaaccctgtcttggggaaatccaaggatgcaggtgactgggcttacacctggggctccctgctgagctccagccaccttctaacaggactgtccttccttgcccgcagacacagctgcatgggaccccaggaacagtcagaaccagtagttttccaattgttccttggagttccacctggaaatacctattaggggcgagacttaagtgtctgaagtccaaagacctgctggctgccctgtctgcgctgggactggcagttccaggcccggtgccgcatctggctgtgatggtgctgagcggagccccgtgccaaccccagttcttgtcctgcatcacagaagggtctcttggttgttgtgaggcagcccttgcagctcacaagggctggagtccctccgaggtgcgcgggtcagcctctctcagaaggcggccacctctgtcacagctctcctgggttttgggctggagtaccctggatgaggacagcacaagctcgtactccacccggggctccgggagtgcttggtgcttcccgaggaaggcagggtgagagggtcccggagtgccgggctccaccaggactcaccgccttcacctcctgggacgccggtacctggcagtgaactctggagggcctgcgggtcattagagtcaggaggtctgagcgtggtgcttggtcatgtcccatcccaaccagtgagagccacgcggcctccctaaggccagtcgtggggggtggctctggaggtttgtggtttgtgtgagagggggtgcatgtgtggcagatttgagcccagtgtaaactgcttctgcccacagcctcctgtccacgctgcctgtctctgcccctgttgtctgctcgctgggggagtgccagctcctttcagtgccggacagagcgtaattagacaggatttgctggtgctatgaaagctcagcttctccccaaggtcaatgctgaattttagatttcccatgccccctctccctgcagaggcaactgctgagcagacggtgtgataaatgtgtgtgtgatctgtgccaagtgcccttcctgggagccctgacctcgcacagtgctcaccgtcatggtgccacagcgggggtgccaacgctggggctgggtcccaggtcccgtcctggttctgcctatgacttggctcatgggtcctgctcggctcttttttgtgcctcggcatgttctgagagaggtgtgggggtgagggctccccgctgaccctcccgtgggcggcacgtggcatctgactcttgctctcttaacagcgtgaggtcgaccgcaaccaggagctcctgacgcgcatccggcagcttcaggagcgggaggccggggcggaggagaagatgcaggagcagctggagcgcaacaggcagtgtcagcagaacttggatgctgccagcaagaggctgcgtgagaaagaggacagtctggcccaggctggcgaggtgagcggggcctctgctgcgcagggagctgttttcccgaggagagggagtgcatgctcttgtttgccactgcagtgcccgcttgtgttttcacttgtgcttcccacacgggcagctgcgttttgtacatagttgtcatcagtagaagtattaattttccattctgtagttttcagttaaaaagttgagactttgggccgggcgcggtggctcacgcctgtaatcccagcactttgggaggccgaggtgggtgtatcatctgaggttgggagttggagaccagcctgaccaacatggtgaaaccccatctctactaaaaatacaaaaattagccatgcgtggtggtgcgcacctgtagtcccagcctgtgggactcgggaggctgaggcaggagaatcgcttgaacccaggaggtggaggttgcagtgagctcagatcacaccattgcactccagcctgggcaacacagcaagactctgtctcaaaaaaaaaaaaaaaagttaagcacttttttgcctttgtaattatgaatttaaatggatgatgaatctgttttttgttgtttgtggacgtttagtgtgtttgtgttcgctcatgtatgtatgcgacaggtagcccttccctcagccctcgcttctgttgactttggacagacccctaggactgggttataaggtccctagcgatggcggtctctgcagccgttgtgctcagaggcctggctgagggctccaatttccccgtagccttccctgtcgtggatggtggtcttttctggaaatagctgttgttttgtcaggaggcttaaggaggcacgtctggatttgcatatctttgactgtctgcaaggtctacaggcatctgatggcgtcggataattgcctctgaactggagcctgtgtgaactgcagtcctggtgaaggttgcttgcattttagaaacagcccagacatgggcactggtggaaattggaatcttctgacctctcctgtcctttgtctgtggcgatcaagatcgctggtgccaagaggaaacatgaaaatctgctggtgtgggggtggaggcgtggtaggggtggggtgggcgtgcagcgggggtcctggaggggtccagaaactggccgcgggtccttcctgtggccgtgctggggaggcgtgttcaggctgttcccctatctgcttctggagggaacgttggcaggagaggaggcgtgattggctcccgagaagctgctcttgccttgcccatgctctgggttccagttcccatgtgctgggctgtgctggagttgggccgggggctgtccccgctgcctgcgggcacctgtggttccatgggggagggtgagtcgtgccgagcacttcatgaggggcagaggagcaggagactgcaggagccgcagggcggtgcccggtggggtggggcatagtgaggggaagatggtggcgctgcaggtgctgctgctttggcctgtcatgtctaagccgaggtggcagctcctcagggaagccctccctgcgcactaggccttgactgccttctcctgtcacagggtcctgattgtcacgctccttactctggaattatcttatgcgcctcttccttgccaactgtccggcgtcccctacaacacgggtgaccctgtgggcaggtgggctcggccctgcatctggccttgcccctggcacacggtgcgtattaattgagttcggaagacctctgggaggatgtgtttattgttagtatgtttttaatacctttcttctttgttgactcccaggttgatgcttcactgttgtggtgaagtaaaccgtacatattgtgggcatgtggggagcacgcagcccccatgcgggccttcccagagcggcgtggggtggacagcggtgataggcttcagcaggccctaagctgggcacgttctcagggacagggaaatgagtgctgaggcctccttgtttgcggagggtgccgcccagccaggcccacccaggtcgtttgctgtgtgagtttgccattgtcctgtcctgggtgcgtggtccccagggctgacatcacgcccgtgtgtttccgtgtgttaacttacagtgatgcttctcagggtctgtccggcttttcacattggctcgacccacgtgctctttctttctctgaggacacctggggttttctgagcttttccagagggttagggtcctcagaaggtcgcctggtgggagtggtcaggaggaagcctggcggttctgtcgcgtgcgggttccatgatgtcaggcagacctgctgtcctggaggctgccagaggggctgctggctttgctcaggggccgcctccccaggggcgctcctgcccgtgccgcgtgctcccgttccaagcgcacggcctccccagcaggtaccgccctgccccttgcacagcctccgtctttgtcctgttggttggccagtgccttgctgtggtgtgagggcgatgtcgctagcaaacagccgtcatggtagcattggggtggctagggagggatgacaggagccacggttggagggaagaccgaagtgatggtgtggcgggtatgtggatgtctgatgggactttgggagcgtggggcactggcacagagactgccaggtgccaggcctgagagtccgggcccatcttggctggtggaggcttttgcttctgaagccgcctcaccaagcctcctttccagggcccctggctggggcccggtctcctctgtcagctcctgggtggcttgtggcaggctctgggctgtgctgctctggagcaccaggaggagggtgggccctgcgtgtgagcgtctgcctgacctgcatcctccagaaggaggtggctctgccccctggccctctgctcccctgctcctcttccccctgccctctgccccccttgcccccttgccatctgcccccctaccgctctgcccccctacccctctgcccgatgcccctctgcccccttattcctctgcccctctgcctcctgccctgattatagcacgtgggtggtgtcgcctctccactcttctcatctccatgtgcaggctccttccacgcacgggctccactcactgagcggctctctggtcccctctacttttagaccatcaacgcactgaaggggaggatctcggaactgcagtggagcgtgatggaccaggagatgcgggtgaagcgcctggagtcggagaagcaggagctgcaggagcagctggacctgcaacacaagtgggcggggccagggtgtggggtcgggggtcgggtcacgtgtgggggcatgcgtcccacctctctcttggtggctgggtgggatgtggatacactcccagatgctgtcctaattcacagacactcaagaggggcagatgctgaggcctctggagccaggaccgtgagcccagaaagtgtcctgatgttcctggagcagaatgggggcagcaacttcctccccctccttcttagagagggctcctgcagagccagattttactttattttttgagacagggtctcactctgtcgtccagcctggagtgcaatggtgtaatcatggctcactgtagcctcaacctcctgggctcaagtgatcctcctgccttagcctcccgagtaactgggtctgcaagcatgtgcagtacacctggctaatttttttttttttgagattgagtctcgctgtgtcacccaggctggagtgcagtggcaccatctcggctcactgcagcctccgcctcctgggttcagtgattctcctgcctcagcctcctgagtagctgggattagttttgcacctggctaattttaaaaaacgttttgtagagatggcggtctcgctttgtaacccaggctggtcttgagctcctggcctcaagcgatcctcctgcctcagcctcctagagtgctgggatcccaggctgagccgccgtaccctgctgagggctaggttgaaagggcagcatcatgtgccttggaggtggagggggcgtggctgggaagggatgtccaggcacagggctgagccgaggcacagacgtgagagccttgtctggaggtgcagtcaggagactgtgggcatctcctgcagacttggacccttccatcagcagatgtggttttaggagagttctagttccgtagtagagaggagaggtcattcctgggtggggccctaccgcagctgcaccagggctgggggttgccgcaggcaggtgagagctgtgggttccactgttggagaggtccttgcaggtggcctgggctcactacgcaccccgtctgaatgagcagactgaggcctgagagccagcccacaggggctggggcctgggaccttggggtacccatgcagtggagtgtgtgttggcggggggcggggggtctgtgccgtgggaggtcctgaaccttggggtgggaatgaacgtatgtgggtctgtgctggggcgggtctcaggctgaggagaattgttggccttgccgcatgcctgtttctgtgtgtgatgtatttttctttcaatagaaaatgccaggaagccaatcagaaaatccaggaactccaggccagccaagaagcaagagcagaccacgagcagcagattaaggtgagtcactccctgtcagtgccttgtggacatccctgtggtggccttgactctcctgcccctgtcggcctttctgcgctggtgccgagctccgtggtccttctgtgaggttagctgctgccctgtgtgttgggcactgtgctgggcaccagggatgccatggtgaatgaggcagatgcttccgctcttgggagcgtgtattctagaggagggagactgaccacaaacaccaagagaaaatgtccgtgtgtgtgatgacgtcaagtgctgatgagcgtgagaagatgctacaggcatagagaggttgagaaagctgcccacagttgcacagctggagctgggtctcagtcagggcatctgactcaagctcaggctgtgccatttccctgcggaggacgtgccagggagacgttgactccagatccctctcctgcctcctgttgcctggagagcagcctccagaccctgtgctctggccgtgccctctcagcccttatgcaccctcacctccaggcttcacaccagctcttcctggctgcagagctgcccggcacccccagcctggcctctgccatgtccgctcctggtggtggtccctggcccctcgcagccctcagtccacctctcaggattttctggctggcagggcgatggactctgttagtgtttgttgaatgaccgtctggtttggtcgtggtttcatactctgcctgttcagtgacttgctgctcacagatgccagctgtctgtgtcccaaggggactgggtaccgtagggaaaagcctgtcctcactattggaaagactgagctgtcacacgtgctgctagagtggcagaagtgggcttgacacgggaggggtgggatgttttaccatggagtgccatcctggaccagacttgagacagacttttgctcctggagagctccccgagggcaggtggtgagcacagcagcccggcagtgtgcagtgtgaatgccagctcccagtacgcggagggctgggaggtcggcgctgggaagagctgccctggagtggatgctgaggctcagtattggaagcagcttcgaggcccctggtgcagcccaggaaggcctcccacaggagagtcctgaggcatggaggctgctgaggacctggggcagtttagcgaaggaactttgtgacctcaatgactttaatttttaatggatggtattttctagagcaattttaggttcacagcaaaatgagcagaaggtaaagctcctgtgtaccccctgcgcccgctcctacacacacagcctaccctggtagagtggagcacgtgtgacggtgatgaacctgcctggacacatcagtgtcacgcagagtccacgggtcatgcgagggtcactcttggagtgggacagtgtatggttcgggcagatgtaaaatgttctatatttgccattagagtgtcacacagaaaagttttactgcctaaaaatcctctctgctcccccagtcaatccctgcctctctccttctgagcccttgacaaccccttcctttcccagaacgtcctgtggttggatcctgcagtgtgtatagccgttgcagaccggcttccttctcttagccgtgtgcgtgtgattttctccaggtctcttcgtggctcatttttcccttcttctctgtccctggcctccatcaggatctggagcagaagctgtccctgcaagagcaggatgcagcgattgtgaagaacatgaagtctgagctggtacggctccctaggctggaacgggagctgaagcagctgcgggaggagagcgcgcacctgcggtgaggggttgcgggggatggggcagccgcctcgagtgagtctgggtttgtgcacatggagcccactgtgcagaccctgtaggggcagggctcccgggctcttggccttatccctagggtgtgtggctatttgagcgactctttgtggcactgccagggagatgagagagaccaacgggctgctccaggaagagctggaagggctgcagaggaagctggggcgccaggagaagatgcaggagacgctggttggcttggagctggagaacgaggtgagggcctgtgtggtgtgcggttcctgtgggtgtcctctgccctgcctggaggagcctcggtattgtggtcacgcccaccagctgctcacctacaacatggaggttgctgtgatggggtgggaggcagaatcgtggtccccagagaggtccatgcctcatcctcagagcctgtgaacacagcaccttccctggcagggcgaatgaggtgactggtcagctggcccacggcggggaggggctcctgggccatcctgggggctcagagtgatgtgagagggacttggcagctcttgctgggtgtggagatggaggacgggccacaagccaaggaatgtgggtcatctggaagctggaaagagcagggaagtggactgtcccctggaatctgcagaaggaacacaaccctgccaacaccaggattccagctcggggagacccgttttggatttccgatctaaagtactataaaatattacatttgtgggctttttttttttttttttttgagatggagtctcgccctgtccccaggctggaatgcaatggtgcgatctcggctcactgcaacctccgcctcccgggtacaagcgagtctcctgcctcagcctcctgagtagctgggactacaggcgtgcgccaccacacccggctaatttttgtatttttagtagagatagggtttcaccacgttggctaggatggtcttgatctcttggaactcgtgatccaccctcctcagcctcccaaagtgctgggattatagacgtgagccaccatgcccggccaggctttttaaatgttaaatttttttttgtagagatggggtctccctgtgttgcctaggctggtcctgaactcctgggctcaagtgaccctcccgcctttgcctcccaaagtgctgagatgacaggcgtgagcctctgtgccgcaccaatttgtgttgtttgaagccacttagtttgtggtgatctgtttcggttgcagcaggaaactggtacagagggtgagtcagaatgcgtgtggcactgtgaggatcagggctggcagggccctgtgctgggggtgttctgtcttcaccgcggcagttggtaggaaggtgtcagtgctggaaaacatcctgcagtcatgttgcgggcagaggaggaaactgaggttcagagaagctccctctcttgcccggtgcacagcaagtttggaccagaatttaggccttctggcccctgcctgggtcctctgtccttcatgccacttccctgtggccacagccactcccctctgtgcctggcacacctatgccgcctttctccggtggttgtggggcctggcaggagggcagactccatctgcagtgctctgcagctgcccagctgtccagctggccacttccagagtccccttgggtggcgtggcgtctctgtcctcttcagagctgtgatacagccaaggtcgttttggggccttggccctgtgacccacggtgaggtggctccctgtcagcgggggtatctggcagggactcttctctcaggtgctgggttctgtaggagcttagcctgaaaagacagctcccatgcgacatcttttctctctcccgcggtgtaatttattgtttgatggttgaagagttggggctctcaagccacattccgtagttgggtgcttgctgctccatgtccctgggccagctccttcatctccctgtctgtctccccgtctgcacagggaggagtggtgctggctgccttgtcaggactgtgaggctcacatgagtctatgcaaagtgctcagagcagtgcctggcgcgtagcgaatgttctgtagcgttggctgtcatatagttactagtcaagtgcgtgcctgcgcataggaggggctgtgagaatacctcactgacttgccgagtggagcgttgataacagcatggtgcttggcactgggtggaggtgaagcgaggccagaacaaaggcacagagtccctgccctcagattgcttccgtcctagaagggccgtgagactcacctctttgggatgcggctcagcatgggacaggcatgtgacacagaggggtgggctggcctgtaggcagtgtctcaccctccctcatgctccagggtggctgccctcctctcctagggcctgctggtcctggtctgctgtgtgatggcaggaagtttggctccaggactgagtctgtctgctccagggcttggttccctgaggagcccctggaagatgggggagggatgagtcctaacggctcaaggacccgaggctgctccctggggcacagtcaaccccaggatcctttctgaggctgtctgccttctccctccacagccacacgttgcttttagcttgctgggattcacacttgaatttacggggccaggaaggagtgaggcaggaagcgccagtgtggcttctgcagttggggaataataacccggccacttccaagcagacttggagcatgtagcgcccagctcagagatgagggcaggctctcctgagaggtcagggacttagcaccgtgatcatgattgtcagtcttatgtgatgatcctgtggcaggtgatgacagggtctgtgcttttgttgtcttttcagaggctgctggccaagctgcaaagctgggagagactggaccagaccatgggcctgagcatcaggtagggaagggcaggtgtctccggggtcccgccttctttgaagggtcctgggtgaagagcagagcctgcttccggctcaccagcgcagtctccagccaggcatctctgtggctggtgcggggcatttgtcctgggctgctcaggtttaatgaggcctttcccagcggatggggcagtggaacccagtgactcatcctgctgaagccttagtaacatcttcattcagaagcggaatatccacagcaaaccagtggcaggcgtctgattgccctgcgttgcggggctttgtgaaaggactctttttggtgtataccgaggaaataattgcttttgggggaaatcattcattttagggaactgtaaccagtggagatgaactgagtttttagaattaagaaaaacccactgtattaggctgttcttgcattgctataaagaaataccagagactgggtaattatgaagagaagaggtggaattggctcacgcttctgcagctgtacaggaagcatggtgctggcatctgctcggcttctggtgaagccgcagggagctttcagtcatggcggaaggtgaagggggaacaggcacgccacaatgcaaaaacaggaatgagagagcgagagagtgagcgagcgtgagtagtgttgggagggaggtgccacacacttctaaatgaccagatctcatgagaactcactatcatgaagacagacccaagctgtgagggatccactcgaggatccaaacacttcccacggggccccactttcagcactggggattacaattcaacatgaggcatggggcagggacacagatccaaacggttctcacccaccatagtggaagacgattgtctggtgcttgtagcagcctcttcacgcagtctgtgccaagctgagtgccagcgcttgggtggtgggatgtggggtggagctgccgggggaccaccctgggtgctggggatggtattcttatagacaggtagctggaccgttcccaggtctggtcctgtctgtcctcctgccccatccttcccaggaccctgtgctcatctttctccagcagccgctcagttggcccctgcccttcagtcgcggtgcccctgcaggtgaccacctcctggcagctctggtctggacccctcttcctggttgccctgtgtgcgccaggtctcgaggaggtgcaggagcgatgcttttgaaggagccatcagagcccggggctcagggcccgaggtgctggtgccgaggcggcctcttattgtgtttgcttgtgagatttcaaggcttcccgcttcttgcctgtctttcctgctgttcttggaaactaggctgagactgagactctctgaaagagctatcctttgaccacaccgtccgactgctggttctggaatccattaccttctcatcagcattactggcttcagttctctgtcacctgaaagtgcctcttcattttctttgagctttgctaagtcagagcacggcccgggctgctgtctcctcttgaactccccctgtagaacacagacttctgtagggccggcctcagcggggcctaaatgctttgtgcttctgtctgttctctgggcttattaattgcttggaaggcgacccttctgctcccaggcatactctggccagatgagaaacctctgtgacttctttcctgtgaagggacatcagaggcccccacgtgcctgatgggcccggccctgctggagggtccagtgtgcagtttgccctggagcactgggtgtcagtcgggcacgagacctggcacagctggctgctgtctctggctggtttcaaagtactgtggatcctttcagccctgttcccgcatctgagcgccctgcctgggcatggcttgtgtgagggcgagctggcctgggggtgctgcctgggcgtggccagcatgagggcatgctggccccaggggttctgcctgcctgtgtcttctgtgttcactctgccctccctggtggccaggccctggatgagggagaggaggggttggtctgtagggctggtggaggtgggctgcctgtgcccaccaccagcttaaagtgggcgggaagcaagtggcatgcatgtgtggcgccctgcagctttgatgaggaacacagatagttcttcggaggctggattcaaggctccccctgccccccgccaccaacagtaagacctgtgtcaagtcactgcgctgctctgggccagtgttctctttattgaaagggggacacggagctcttctccccaactgcgtgtgaagatccgacgtgatcgtgtacttgtggagggccctgtgagttggagaggggctggtgcgagcgtcctctctgagcagccggaggctgatggccaggaaggtggatggagccgtcctcgctgtgggggtcgacccctagtctcctgcgttggccttggctgtgggcctggtagagggcaggtttcctcacgtgctgggttgcctgccatgcctgggccccttcagggctccccgctgctccttgtgttgtgctccacagggcgggtgtctgagtgtggttctgcatcaggccgtgatctcgggtgactcacgctggacgtcagtggggtggtgctcatgccgcagtccacgggaatgcgggctggcggtcccgaatacggctcctagagagtccacgggaatgcgggctggcggtcccgaatacggctcctagaatcaccgggagggtttggtaaacgtgtgcatttctggctgcgcacagtggctcacacctgtagtcccagtggtttgggaggctgccgcagggggattgctcgagcctagatgtttgagatcagcctggggaacgcagttgagaccccgtgtgtaccaaaacaaaaattagcggtgctcagtggtgtgcacctgtagtcccagctactcaggaggctaaggtgggaggatcacctgagcccaggaggagctgtgattgcaccactgcactccagtgactgagtgagtccctgtctctaaaaaacaaaaacaaaaaccaaagtggatttctgggtaaacctgagatgcactgggctttcttttctgtttttagggaccaggtttggggtagttcttaggaatttcccgtgtctggcagcattgaatgtggtggtgaagtcggcgacagggacacagatgtggtgagaagctggggccacgggggcccccatgggagggctgagtgcatttgctgttcttgtgtggagacatgcgtgcctctgtgggcgagcttggggatcccctcctctcagccgtggggacctgaggtgacatcagatgtcctggaagcagagggctctgtggctgggagtgccctgggcctgtgccgggtgggctggcgtctgcttgccttcgggcccaggctttgctgggatttggggcttgccgaggcccgaggccccgtgggtgtggaggagctgctgccactaggtggtgcccccgccttggtgatccttcccacagcagcttcccttgggtctctctggcctagtggaccgctgctctcccaccatgggacttgcttgctgacactggggttttggtcgatggggatgtgaggggcttgtggccactgttcctgactgccttcaggggggcgcttctggctgtcccatgcctgccttgtttctgaccagtgtcctggggccctcaggcctgtgggctctgggctgtgagctcctggcgttgaggtcagacgtcctttgtgtgggcccttccctaaggacagggtgctgacgtcctgcagtcctcagagggctcttcagcctcgccccgggcttggataaaccctggctgagccccaggagagagtggcctggtcaccctcttccccatgtagggcttcttatgtcttaggagaggaggctgggcaggctggctggggtgggtcagtgaaaccatgggaagaccctgtggaacgaggtccttatgtgtcacacaggcctgggcacatgtgacatgtgcagcacacgggttcacgcaggctgggggcatgttagtttctacgactttgaagtcacaggcaaggagggacacagtgcgtgtggatgagcctgcgtgaacacacgtggggaagggcaggatgccagtgccgggagtgtggtgtggacaccctcatccttagggtgctggaagttgggctgagggagttagcagcagtgcgaggcgtgtgtctggaggcagcgatgtgatcagcttggtctcccaggagcatggtctgtctcggggagtgacttacgggtgaggaaagcggaggccagcacacaccctttgaggtacgtgtcatcctcggcaagacctcgggcacaggagggggaggaggagtaatacagagaggccagtgggaaagatggcgtgaggctggagcccatctgggaatgcaggatgcttgcttctctttggaaaatcacctgtttcagtagaatgaaagggggtgcaggccatctctgtaggcgaacagcacaaccatttgtaacaatccaagactcgtttgtgatttaaagttctcagcaagctaggaagagaagagaacttcctcaaccagctaaatgatacctgcagaaaaccagctgatataatacaaggtggacggactgcatccctgacatggagaccaggcagggtgtctgttccctgcacccctggttgcactgtactggagatcttcaccagtataattagggaagcaaaaagaaaagatggacagactggaaaggaggaagtaaaactgtacctggagacaacataattatctatagaaattcccagggaataaatgacaagccagtaggactaaaccgtgaggtttacagggtcacgggatacaaggacaatgtaccaaaatgggttatgtttctgtatactagcagtgagccactcgaggtacataccatgtatgatggcatcaaagtccatgaaatattaggaatgcatataagaaaatctgtgtaagatttgtacactgagaagcttaagacgcaactgagacattaaagatcacctgatgtagaaaaatggagacattgtaagaggaaaaatgaactcttttcccctctgctctcacacagcctctgacaccagatactggaaggtttcccccacaccaagcagttctccaggggtcaccagctggatgtcctgcagcctcatctgcacactctccacctggagttccatcagcttccaatgggtcagggcccagtcccacacatctgtgcccccttcagattccaggtgcaagtagtaggccggcatctctgcttcattttacggttttcttctcttcctctttcactgacatcagctgtacttctgactgacaggctgttaaacgaggcccctgctacccactccttgggtttcattaattggctagtgtggctcacagaactcgggaagatgctttgttatgtttagtcatgtcttataaaggatgttacgaataatacaggtgaacaggttggcagagtgaggtgtgaggagaggcgcggagcttccatgccctctctgggcacaccaccctccaggagcctctgtgtgtgcagctctgaaccctggccttatttgtgggtttttatggaggcttcatcacagaggcatgattgattacaccattggccgttggaaatcaactcacccttcggcccctctcccctcctaggaggttgaggggtgggactcaaagtcccaaccctctaatctcaccttggtgtttcggataaccaccctatctgaagctgcctgggggctgccaaccagcactcagctcattagttcacaagagacactcttctcactccagataaggagctgcatgtatgtcagggaacagaaagaccaaatatatatttcagagtatcgtaaaggtactgtggtcgtgtattggaagattcattattgttaagatggcagtttgctcaaattgacccaaatatttaacatagtcccaatcaaagccccagcagaaattgatgaactgatctctaaaatttcttttttttttttttttttgagacggaatcttactctgtcgcccaggctggagtgcaatggtgcgatcttggcttactgcaacctttgcctcctgggttcaagcaattctgcctcagcctccccagtagctgggactacaggcatggaccaccatgcttggctaatttttgtatttttgtagagacagggtttcgccatgttggtcaggctggtcttgaactcctgacctcaagtgatccacccgccttggcctcccaaagtgctgggattacaggcgtgagccactgtgcccggctgacaatttctaaaatttctatgggaatgtaaagtacctataaattgttatagccataacagtttcaaaaaagaacaagttatacagcttacactggccaatttcaagacacgttgtaaattgcataaattgagacactgtggtattaagtatagacatgtaaatcaggagaacagagtagaatgttcagaaatgattgaagaatacagtgttgattgttgtcaaagtgtccagataattcagtgggagaaagaatcttttcaccgagggtggtaaaccagtaggctcttcgtggtgaggatgagccttaacacctgtctcatgctggacacaagatttaactcaaatgacgcatagacctatgtgtaaaagtcacaaaatctggaagctagggtttggcaaagaggtcttacaatacaacgaacatgaaccataaatgaaaaaattgataaattagacttcatcaaaattgaaaacttctgctctcaaaagatacagtgaaaaggcagaccatagactaggaaaatatttgcgagatattaacatgtatctgaccaaagatgtgctccaggatagagaaggaactcttacaaattagtaagattaccatagtttaaaaaatggtcaaaagacttttaacagatactttattatttatttatttttttggagatggaatcttgctctgtcgcccaggctggagtatagtggcatgatcttggctcactgcaacctccgcctcccaggttcaagcaatcctccagcctcagcctcctgagtagctggggttccaggcgtgcaccaccacacccggctaatttttgtattttaatagagacaggtttcaccatgttggccaggctagtctcaaactcctgacctcaggtgatctgcctgccttggcctcccaaagcactgggattacaggtgtgagccactgtacccggcctgcttttaacagatactttacaagagaagatatataggtggtaaataaggacatgaaaagatggtcaacattgttagttattaggggaatgcaaattaagactgtaatcgcccaacagggttcttcttgctgcccagaaagccaatgcactgagaacggcaggtgtggcagcagagagggagtttaatgattgcagagccagccgagggaggtggacgcgagataactctcacatctgtctccctgagaattaggaggcgagggcttgagggtgttttggcgggcagcggcctagggagtggtgaatgctggttggttgtgttggggatgcaatgataggggtgtcaggactgtctccgtgcagctgagtcagttcctgggagatggggtcacaagtccaggtggcatctcttgatctgctgaaatgctaaatctgaaaaatatcccaaagaccagttttttaggtttcacagcagtgatgtctgtaggagccgttagggaagttccgaatctgacaacgtctggttacgtgactccgggtagcaggcactgtagaagagcaagctaagtaagcagtgacaggtcatggtttacccgtgcctgttctttagcaaagttcaggcccctgtagcaatgccagtcttaatctccaaacaaggacgggtgtcatttttccttgccttgaagtttaactataaactacattcctctcatagttatcttggcctctgtattagaataagcaaaaaaaaaaaaaaaaaaaagaaaagatcctgtgaggttagaagcaaggtggagtcagtaatgtagatttctctcgttacttaaaattctgtaaaggcggtttcaagactgcagtgagataccactgggcacccaataaaatggctaaaattaagcagactgaccatcctgactgctggcagagatgcagagcagccaggcctgttgcccctgggagtagcaagtggtacggccactttggaaatggtttggtagctttgtacacacttacggtgtgaccctgcagttccattcctcggtatttaatctaagagaaacccaagagaaaatgtggtctcatgaagacttgtacaggaatgtttgtagagccttattctaacagtctgagagcaggaacaactcaggtgcctgtcagcaggtgaagggatacgtggaccgtggcgtctccacgcagtgtaatgcgcggcagcggcggtgcttggaaacatgaaagggtctctcttgctgagtgaaggaagccagacttactgagtttatacttactataccatcccattgatttgaactttttaaaaaggtaaaactgagcaacagtgatagaaagcaggtcagtgatccctggagtctcgtgctgggatatgattggggtcttatggggtgctagaaataccctttggcgtaatggatgtgatcgccgcacaggtgtacacgcagcaaagctcatgacactgctcttgtcaaactgttcacgtgcgcagatcatacctcactcaagctggcctgtcaacagcagacggtcagctcttcggattagctgtgaggggaaggaaaattccttagtggcgacttggactgaattggagagtggcctgggggtgctgtttaagccagccttcatttggggagggacccatcccctgagtttatggaaggcctacggccacggctgcgtgcacctcctgggtctttgttacgtcacaggagtgctgtgaggagtggcagcatgtggggtcagtgcaggctgcagagggtcaaggagtttcacatttgatgaaaagcagaacaagctgcataaatgcaaatgaatggaatgaaaagtggaacgtgttcttcctttcctgccctccctggtgacctcactcagggctgggtgccctgtgtcacagcttcctagccatcgtcaccttgtgttctcagtattcctggggggctgttccagaatagaactgattgccccggaggtgggcagcagggcgtgctgtgcttggccccggttcgtctttctaggcaatgcctgatgagtttcctgtgtgtcgttctggaaatgtgtgtacatagaagctctttatgtactcccatcaccttttaaaattggggctccttccacagttttattctgcaactgttttcactcagtttttgacagttttttggccccagcgcaggctggtctgctgaactactttaaagaactgcagggtgtgctggagtgcagacggactcagactccagcagcccctgttgatggacacttagggtgtttccagcttctttccccaattagccatgctatgctggttgggtaaattcttaaaaggatgatttttagttcaaaagagatgtgcgtttgagactcctagctggtgccacaccgccctcccgaaaagcatgagtgctgtgcgctcccgtcacggcgtgtgactgccgtcacctaatgggggtggtgtgctttcaacgtttctagagagattcagctcgaagtcacagtacagtgaggagagcaggcatcttcaaaggcttggcttttcaaaactgtcatttagcagctcccactgagggggaccctatgaaataggaagggagtgggtgtcaagtcctgtagccgagcccccacttcagggaggaaatcatttgctcgtggccaagatgccgctgtttttggctccttgcctgtcccgttgtgcctgaatctggccttgcttcccatcccggcgggtgggcattatacccgtcagcaagggcaggcctgagggggtgaggaggggctgcagaggaggctgggctggggaggtgggaggcgggcattgctggctcagagtcctggcagctgtgcccacctggaactgctgacccatcccctgtagtcaaagctgggcacctgtcagtgctgacctggacattttcccaaaaacttttgtagactggtcagatgacaagtctcagggcccagcttccctgatgtgtgaggccaattaggaggacagtgaggggatgcatgattttcctctaaggaagggtctaattgaccagcctggacagttttattatcctagttaccgtgcgcgtgatttgtaattacccggctgttgagttgatcaataccagacgccctggtggtgcttgggaaggtgggcgactgtcaggtatgttggtccattttaattggcgccggtttggttttctttggggcatgggaggaggagggggagaagcgtttggccttctggctacttgtgtgagcatggcccttcttctgggcctgcatgccggatgcctcgtggtctgggccacgtttccccttttcgtttgttcattcgttcaccatgagctgctcttgtggagcccatgatctggagggagaaggatccctcaggcctgtgcgtctgtggtgtgcaggtcccaggaccctggagctggagagtggcgagtgtgctgccctccagaggtgcaggccagggtggggcgtgagccaggttcccagctccgtccgagcacggtgcctgccatctctcctcttctcaaccccagctcctcctgtggctgagtcctggccgctttctgccttggggttgtgttggttttccgtaaacgcatcctctcaatcctgagcattgtgagttaagagctggggtctccctttagcgcccctgagccagacgtgcagtaggcgtgtgctgagcctttgaagagtggaggaccgagcgagggcgtctctgtgccttgcagttggtggtgatgtatgggcggagcctccagtgctcttggctgctgtgacagggcccccctggggtcctgcactatcccagcgagacccccaaagcaaggccagcagagagcttcctgacagctgcctcgctttggcgacggccctggctggggtgcagcctgtgcccctctccgcccccttgtgaagtttcggatgggcgttcccagcagtgctgacaggctcacgccgcccttgggcttcattccaggtacggtcgggcaggctggagactgtcagagtctgggggcggtgctgtgggtgttgggaccccgcagggagaggcgagagaagggcttcccagaagagaccgttgggctccacccctgcatgtgcctgactgcacagacagctgagtgctctgcggcgtgtccgggtggaaacgctatcacttggtctcggagctctttttggggcttttctccaagctttgtagatagggctcttctacttataggtctctttttaaattgattttaaaaagtctaaggccagagtgacaggctttagacaagtccggctgccgtaggttccaggatttattttagaggaggcggtggcatccctggtggtatctgggctggtttttactcatgggtgcttactggggtcctgttgcgtgctgtcccctccttgtgggctaggggctcccagggtgtccacgtccctacttttacaggtagagcagggggtgccctggcgtggaatggaggaagggtctgggcagctttgtgacagggctggtaggagggggattttgacaggcggcttgaagccagcgccagccgagggccagaggcagagaagctgaaggcctcctctgggcagcccaccactacctgcccttctctccgaggacttcccagcagtgccatggccttcggagagctggggtctcaggcaggctacggggctccacagctccccacccaacattcctcaacgtcagctttggggctgtgaggtgtgacctctacaggatcacctggggtcactccctgcagccagctgtagctgtcatttgtgtcaggagctgctggtcttgcctgcaccacccacccttcccgccctccacctaccctgcgtggcctgggttcttgggaggaacaggagatcctgagctgttgaattcctggaacccacggtcactcggcacccgcatcccgctcctcccagctcctgcacgcttctcactggtgtggtcacctggaatcaggtgccctgattctgctggacaggcgggaggggaggctgggccgaagggtggaccagcctttgcacgctcagtggctgcaggggggccgtgtgcatgaagcaggcggtcctcgtggtagcaccgtttgtgcagagccgcggtggggagagcgggcttgcgttcacagaagtgctgtgagatgatcacttcatcacaagccagtcagcaccagcctgtggggcggctcatgtggactaagtgatctgactttcctggcttttgtttgacgatgtttccactgttatccaggtgcagagagctctgatctcccacgatcggaagtaccgtgtgcgtgtcttacctgggcagaatgcagagaccttcactggcagctgtgtgtggaccctggggctctgttacacagccaggtgctgaggagcagggctccgagccaggccagcgaaccttccttagaccccctgtgtgcaggcctggtgcctggtgtcgggggcccagtggagaacaagatccggctgttgccatgggactttcgtctggtggggagtcctgaggaggatgtggatgaggtggagaagaggttccaggtgaacgcaagtgtccaccctgcattccagggtggcaggcggcccggggcgggtgtggggtggttgggtgggcgccccgcgtgctatgttagcgtagggtggtgcacacctggccggcaggccttggtcccgctcttcaccctccacctgtcgtgggtgcgccccgggaggggtggaggatggagggcaggcgtgggaagagctctgagacccttggcttcatggagagtgttgggcagttacccctcccttgccctcgggcctttgtgagtgtggcttcctggaactctgggggatttgtcaccagtgactgcagggggctctcccatccctttcatccaggcttcactgtctgccctaagctggggactggtccagctgacctggatggtgcggagtgtgggccctgctggccagcatggcgttgggaagcacctaggtgggtggtgggttgggttgtggccttaccgcggagtctgggctgcagctgagaaagccgtctcctaggaccaggaatctgggtttgggaggctggaggtcttggcccagcagttcagtggctgcccggtgtgtctgcctggcctggccctcgtctggtttccgttgtctgggaggcacccctgcccgtgccaggcggggcactgcgggggcgcggatgcggagtggaagactgctgatttaggaatcgaaactccagggacatccgtgtagcagagtgattctaagatgattaagaaaaccatcaatgatttaaagaaagtgttcactgcagtccttattgagcggtttgccgcgtgcagggcatgtgggggtggcgcaccaggctgcaggcgcccttcatgacggcaggcaggggacctcctaggagtcttggctgtgacacgtgaggtatgaaggccagaaaggtgaacgtgtggaatctgtgacccagaagtaacaaactcctttcttggagagcagttaggtattccattccttagtccatatgccaacatttaaaaaggccaaaaccagaggcctagaaaatgtatctggaagttgcagtgagaccgtttttgatcattgtggccttcctggggctcagtttcctcgctttgcaaatgccattttggcagggatctgctgtggggcatctccgtgcaggtggagctggagttgcgcatctttctcaggctggcatcatacaggccccagtgcactctggcagggaggggcagccccctcctggatagccccgcccaaggccgggaggactgtgaaggggggatcccactgcctgacctcagcctgtcgggccccacagcgcgtctctctgtggactggtcgccggcttcctgtggcctgtgtgtcctccgagtggctggagctttggaaccctattctgtagcttggagctcctgagcctcaaagggcaggggcctggttccttgcccatccttgcccagcctgatggcctgtgcttgtggactgtacatgggcacctgctttaacacctggaggagtaggggctaccaagagcatgtggctctgggcctccctgggagagtcactcagcggcaggagaactgagtgggacacatcagggagtgtctgtctcatggacgcctgttggcctgcagcctggagagggggcctgaagtgtgtgttccatgctcttgacccccaggaagcactcgcctctgttgaaagcctcgtgccgcagagcgcgattgctgtcccgggtggacggccatcacgggctccttgctccggcgatgccagcgctcctggtgttgtgtgtggctggctcccccttgtctcagccctgggcttagagcaggccaggtgctcaggcagtggttttgttgcttgaaggggggtgtgtacctggctgcagcctgtggagagcgtgagtggctggcagaagcaaaggcgggctcttgggagatgagagcaggcagccggcctggaggcttccatggggctggtcagctcctgctggctcttcctggcacaaatccacgctgggctgggtgccttggctcacacctgtaatcccagcactttgggagcctgaagtgggaggatcgcttgagcctgggagttcaagaccagcctgggcaacactgtgagaccctatctctatttttaaaaataaaaatataaagataacccttcctccaaaaaaaaaaaaaaaaacccaaactcatggtggaccttgggatgagcgggggcgcttgtggggcagaactgggtgtggttgccccgtcctgggcctgttcccaggcctgctcttagaggaggggctgatgggccctgtgggtgcagggagatggggtcagtcacaggctggggcctgggggctgggacctgggggctgggacccgggggctaggaccagttttggctctcaggcagggaggggttgtgaactctgttttgggaatgtgtgtttgaagtgtcagtgatgtagccagaaggaggtgtcagacagcagccgatgtcaggcctgcatggctcctagaggagccctagggctggcctgcccagtgaggggcagggatgagccggcctaggggagtggcagagccagaggagcagacagctggcccgagtctggagggattttggcgtttgcaggtggctttgagcctgagggccagtgcctcaccgggtcagagagctctgcagcccgccagtcctggtcgtgcctgtgtccgagcttgggcccgtgtgcagggagaaggtggctgtgcagtgcacgtcgtgtgtaccaggcgtcggcggagtgatgcgtgggtcggggcgggagatgagaggaggagtgaggagaggctagaagcctccagagcagtggggtttcttcctcttcttcactggtgagtgcttcttgaacacataggtgtgcaggcctggtgctgggtgctggggatacagctataagtcaggggctgttttccagtcctctcagatctagccgggcatatgtctgctaggtcaagcgtggctcctgaagagatgacacttgagaggctggcagcatgttccagatagggtgggtgctggcagcacacaggttggccagatgctgcgtgttcggacagtgttgtgtggctccagctggttctaaccacagttctcctgggatgtggcagaagctggacaggttggcagggatctgtcctgtcctgagggtggtttggaccgcgtcctgcaggtcacaggagccgcagaaggtcttcatcagggaggagcacatccgccaattgtgaaggggcctctttcctcactgaattcgcagggcgaggacctggcgccttggcaggaccctgctggtggaagtccctggggctgtctgacccgctgcaggtttcagcagccccgaagtgtggggagggtgggcggtgtttcctgttgtcagttgagagcctcatggagtaggagccgtggagtcagccgcgttgtagtgagagttagaattgagctgcactgttcctgtgagcagggagcccgaggccttctgacttctgaagagggttcgtgttgaaggccagactctccctgtttttctgtttcctcttcaggtgaatgcctgttcctttgtgaccacagtgtctgtgggtagcactgtgattttggagacgctcgtttgtttgttcatctgaacatttatttggagacctgccgtttgccaggctttgggctggctctggcgacgctgtgacgagcacagcacagtctgcccacgtagtgcacacacacagacagctttaaacaatgaaaacaacaggggtgcctcctcagatgcaatcttttggaagatgccgcaggagcgttttgcgggagtatcttagttggagacggccttgttggatatgaatgacgctggtgggaatgaaggccagacgttttccctggtttggaaacaggtggcttacaagagtttctagagtttatttgtttaaagacagagcctgttctcaagagggtcttcactttgctggcaggatggcactgttgacggtggtggttggctctggagagctgctgtgtagttgacaaagcctgttgataatcagcgtctcattcgttcttcctcagaaccctgtggactaagctgggttctgggaggggctgactggcccaagggcatccagtgaatttgtggccctgttgccggaatgcttggctgatcctggagtatggtgagctgtgccctcaataacctccatccatctggctggccacatggtgccatgcagctggatcctgcatttttgtgagctgatcagcccgatgctggcactgaaaggattctgttgggagctgccatccatttagcctgagcggaactcagcacatgtgcgggcatgaagcccatcagctgatagcttctctttcagacctgatggctcccagccgaactttggcaagaaggacctaccagcctgctggagggctgacctgcctgcctttgctgggagccaagcacctcctggcagttctgggatttggttttcagtgggaggaggctctctgcaaggtagagtaagagcagtaattacttgggagaggaagcgtttaacttctgaggctgcaacacaatactatcttgttcgcggaggtggctgagttagaagattagcaattaattttttatcaggtgcaaactactcttcagtttcatggaatcaaacagtcctcccacagcaagggaggggcaggcttccaccccgtgtaatttttcagagcactgctgtttgtctgcttttgagctgataggaattatttacgagtctatttggaggacattttgacacacaattcttggtattcccatttgctctttctagtttttacttttcctgcattgctagcgtttactgcaattaggtctcaggagtattttgccttttattaggattgcaattacaaaatgcaggtatcaactaggttcctttaaatcaaagctcactttttattgactcggataagaaaagtaggtatttttagtagactgagttgaaaagagtgtcattggtagctattacaagcatttcttttagtttaggtgtttttattgtttacgagagcttagctgaagtggcatagataacccagtaggggtcactgctaagttatctgtaagttttctaagcttgagctttagattcaaatacttttttttttttttttgagacagagtcttgctgtgttgcccaggctggagtgcagtggcatgatctctgcttgctgcaacctcagcctcccaggttcaagcgattctcctgcctcagcctcccgagtagctgggactacaggtgcgcatcagcacgcctggctaatttttgtattattgtatttgtttttttagtagagatggggttttggcatgttggccaggatggtcttgaactcctaacttcaggtgatctgccttcctcggcctcccaaagtgctgggattatcagtatgagccactgcgtccagcccaaagacttttaataatagaaaaggtactttctcttgtttcatcatttagtatgctaggttttctttgagtttctgtaactaaacagtgggtacctatgataggttgggatggatttagggcagagtctggtacgttttttctgtaaagggctgggtattaatagtaaatatttactttgtagctttgggggccataaggtctctgttacaattagttggctctgcctttctagcccagaatagggtgattagccctcacggcttgtctgagactgaggagttttgcttgggaggtgggacctttcatgtgaaaactgagatgacccaggatgaaacaggactgtcactgattttagtgcaaaagctgctgtagacagtgcgtaaatgaatggatatggctgtgttccagtaagactttattttcaagacagctggggtgggagtaggtttggcctgaaggccatgcctgctaactcctacctgaggatacagggctagccatttaattttggtttaaaaaatccatgcagaggctgggcatagtggctcacgcccgtaatccccgcactttgggaggctgaggtggtaggcagattgcttgacctcaggagttcaggaccagcctgggcaacatagtgagacctcatctctgcaaaagaatacacacacacacaaaaaaattagccaggcatggtggcacgcacccatggtcccaacaactcgagaggccaagtcaggaggatcacctgagcccaggaggccgaggctgcagtgagccgagatcatgccactgcactccagcctaggtgatagagcaagaacccgactcaaaaaaaaaaaaaaaaaaaaaaaaaatccatgcagagccttgctgccttttccctgcagcttttctttcccatgcagagccttttgctgcccacacagcatcatggtggtttcttcctttccagatttgggacagttgggcgacggtgtggccttgcctgagggtggttgtggaagagagcctagggtgagactggcgtctcccggatcgcggctcagcacctgctctggctggagccttggcagtgcacagtgaggttttccggaggaatctggagttacccgcggccgtgttaccccttggtaataattttgaagggataaaacccttataaatttgctcccagggttgagaagtgctcatttctgtctcgcctttttttctggtagccgagggttcccaggagcacatattgtgatcacgtctgttccattcaacaaatatttgttgagggcttatgacgtaccgtggtgtatactggctgggagatgcagcagagagcaggacgcacggtccctgtgctgaaactcagcacagcaatgtggtgctgggggcggaggcggggaagggctttgaggaccaagagttggagggccttgctgttctaggacaaggaccgtcctctgggcggggacgctttctctccaggacgtggtggctgtcggagctgggtggcccttgtctcaccccggttgcttgggcaagtgagtatgctggggcgtggcttgggccgatggtttgtgagcctgcacctgtcagcctcagtttgggctccctgtggggcgtgtgagtccctgttctgactgagggttgggttagggtttccagcctccctgcccctgggaagaggctccaccctcctccacgagtgctgagctccgggtctatttgtactgtgaggagttgcttttgtctccatcaaaaacatgaaccactgtttggagcacttccatttactgacaacccttgccaaattaattttatttaattatctcccagggctaagcttgaatacattttgtgttaagttcacagttttttccttttctaaacgaaatggacttaatatccttgttaaaatctgattaaaactaaaattgagttttttgaagtctgattatcccatgaaatggaattttaaacctaattacagatggatttgcatatacttttcagcaccattgaaaagaaacttggtataaatttattaatgacatccttttctctcgtttccttggggcatgacgttagtttaggagcatgagggaggtggggagaaacaccacccttctccccgcccttccttagaattttttaaaaaactttactctgtggagaatcagttccctaggagcctggggcatagtcacactttcattctcatctttgctgctttaccggcttaggtggctgatagttttcctgaattgtttttcaatactcagagctcttgtctttcggaagatggaagaggagcatgcacgatcatagctgctggtgtgtcttccctgtcagcttaaaacgcagatttggccgggtgtggtggctcacgcctgttatcccagcagtttgggaggccgaggtgggtggatcacctgaggtcagaagttcgagaccagcctggcaaacatggtgaaaccctgtctctactaaaaataacaaaaattagctgggcgtggtggcatgtgcctgtaatcccaatgacttgggaggctgaggcaggagaatcgcttgaacccaggaggtagagattgcagtgagccgagatcatgccattacactccagcctgggcaatcaggacaaaactccatctcaaaaaaaaacaaaaaaaacaaaaaaccccatggatttatatttaacgtgctacctccaccctgatttaattttagtttttaattttaagttttattttatgtatttttttttttatcgagacagaggctcgctctgtcacccaggctggagtgcagtgacgcgatctcagctcactgcaacctctgccagccgggttcaagcaattcttccgcctcagcctcccgagtagctgagattacaggtgcctgccactgcgcccggctagtttttgtatttttagtagagacgaagtttcaccatgttggccaggctgatctcgaactcctgacctcatgatccgcctgtcttggtctcccaaagtgctgggattacaggcgtgagacaccgcacccggcttaattttttttaatttttttgagacagagtcttgctttgtggcccaggctggagtgtagtggcacaatcatggcttactgcagtctctgcctcctgggctcaagccattctcccacctgagcctctggagcaggtgggactacagacacttgccaccacgcccagctaatttttgtatttttagtagagacggggtttcaccatgttggccagactggtctcgaactcctgagctcaagtgatccgcctgcctcagcctcccaaaatggtgggattacaggtgttagcctccaccctagttttagatacatttgtattattaaaaaagtaaaaacaaactctaaatgaccattaggtgaaataaacaagaaatttccaaagggccatgttcctgttctttgagaaatcccacttttccaggagggctgtttgctattgtgtctggactcatgctgcctgttgcgacttcctagtggcaggtggaggtaacaggctcccagcgtacttgccctcagtctggctgtcaccgtggttttgtttcgtctggaattatgtgggaatggaatcatacgtcatgcagtcatttgtgtctggtgatttcactggcagaatgttttctgaaaagcattcattcacatttgttgcttgtatcggttgtccttgttatatcgaacggatataccataatttttaatccggttttttgctcttgcagataaagattctgtgaacatttgtattcaagtctctttatgtatgttttcctgtctcttgggataatacctaggagtggggcctctgggtgatatggtatgttttaattttagaaaaagctgatgagccaaagtggctgcctaattctgtcccctggccacccgtgtgtgagaattccgctggccccacatcccgagctctttcattgaattccgctggccccgcatcccgaatgcattcattggccaccttcactttagccatcctggtgggtgtgtgcggtatttccttgtggccttcattcctgttgccctggtgactaatgatgttgaacatctactcatgtacttaacttgacggccatatatcttcttttgtgaagtgtcttttcaaagtcttttccccattttttaattggactgtcatcttctgagttggcagagtactatatatattcatgacagagtcttttgtcagatgtatggtgaatattttctcccggtacgtggcttccttttcattttcttagtgtcttttgaagggtaaaaacttttaattttgctaagtctgatttatcaattcattttctttatggtttgtgttttttgtatctgcctaacccaagcttttagaaactttctagctttaactttactgttaattttgagttaatttttgtgtgtagtgtggtcacagttgagggtcgctttcctgccccacaatacgtatgtctgtttcccatttgaatttccttggcacctctgatgaaagcctgtcagccatacattcatgggcctttgctcgaggtcttctttcattgaatcatgtgtctgtcctttctccagtatggtaaggtcgtaattactgtcacttcctaatactctttgaaagaacatagtaagccctccagctttttctttgtaagaattgtcttggctattttagtttttttattttcagataaattttagatttagctttcagtttgttttctttccccccatttactttttatttcgtttattttttcttgccttagtgcactcactgggacctccagtgcagttttacctgggcatggtgagaatggctgtcctggccttgtcagccttagagggaaagcgtttagattttcctgaagcatgaggttagttttagggtcttgcgagatactgttcatcaggttgaggaggatgcttttcttttccccgatttgttgtattgggtcaaatacatatacaataaaattgactgttaactgtttttaagtgtacagttcagtagctttaagaacattcatattgctgtgcaaccatcaccaccatccacctccaaaactttatcttcccaaagccaaactctgtacccattaaacgctcgctccctgtgctcccccgttggctctaggacccaccattctgcttcctgcctctgtgattttttactacagtagggacctcatagaaggagaatcatgaaatatttgtccttatgtgactggcttatttcacttaacataatgtcctcagggatcatccatgttgtggcatgtgccaaaatgtcctttctttctaaggctgagtaatattctgttgtatggatagacgatccgttcttcttatccagtcacctgttgatggacacttaggttgcttccacattgtagctactgtgaataatgctgctctgaacacgagcgggcagatatctcttagagcccctgctttcaacctgctggatcctgtggttcaacttttaactattttaggagccactacattgctttccacagtggctgtaccattttacgttctcatcagcagtgcacaggagttccagtttctccacatcatcaccatgtgatgtgattttttttttggtggtagccatcctaatgagtgtgaggtggtgtcttgttctggctttgatatgcatttccctaatgattagtggtgtggagcaccgttccatgtgctccttggccagttgtgtgtcttctttggaaaaatgtctatgcaggttcttcgcctgttcttgaatcgcgttattttcattgttgttttaggagttcccttgtatgttttgaatatttttctcttacagatacggtttccaaacattttctcccattctataggttgtgttttcagtctgttgatagtgtcctttgacaaatttaaaatttaaaaatttaccaagatttcatttgtctattttttttttgctgttatctgtgcctttgatgtcatatccaagaaatctgtgccaaatcccatgtcataaaccttctcccctgtttttttctaagagttttatagttttaggtcttacatttaggtctttgatttgttttgggttaattttttgtgtatggtttaagggcccaacttcattcttttgcatgtggagaccagttttccagcaccatgtgttgaaaagcttgtccattcctcattgaatggttttggcacctttgtcaaaaattatttgagcatacgaaagtgtttatttctgggatctctactgtatttcatgggtccatatgcctgtcattctgtcagcaccacactgttttgattactgtggctttgtagtaagttttgacttaaagtgtgactctttcaactttgttctaacttttcaagattgctttggcgagggacctttgggtcccttgagattccatatgaattttaggatagattttcctatgtctgcaaaatatttagttaggtcttgatagggattgcattgaacgtctagatggctttgggcggtgttgacatcttaacagcaagtgttccacacgtagtggtttctggaaggttagttgtggtacggaataatcttttcaaactgtcgtactaaaattcattggtctcttgcactttgaatggacctttatccatgcatggttatgtaacatcatacattgctcatttgaaaatatcgacgcactgaattatgtaggtcttttattatgccttattaaagaaattacaagctaatcaccacaagttattgaaaagtctttaaacgttaggaatccatcaagcttgtggtggtagatacaaatttttaagaatttagatatgtgtttggcagcttgagttttattattgtcaacaaatactcgtggttgtattctttcaaatgataacgtttatttaattcgtttttgagaaaatgtctaccagatgctcaagcctgagtaactattgttggtcagttagtttttaagtaaaatattttacataaaaagggctagttcagttcacaactcaaacatggaagaccaaccatcgcactttagtatgcaccagaaatgtcttacatgtgctttctatttcttcacacagaatgttgagatcttatcaaggggttaagatttaatgaagtgaatattttaactgggcccagtactcctgtagttccagctgctcggaaagttgaggtgggaggatggcttgggcccaggagtttgtggctgttgggagctgtgattgtgcctgtcagtagccattgcagtccagcctgggcagcatagcgagaccccacgtggtgcccctggtttgttttgctaacgtgttatacccatcagtgcttttgtatcttcagttcaaatgtcagcacagttagaagaaaaaaggcaaataatagcttattattattattccttgtttttttggagacagagtcttgctgtgtcacccaggcttgagtacagtggcatgatcttggttcactgcaacctcaaccttctggattcaagtgattctcccacctcagcctccccagtagctgggaccacaggtgtacgccaccatgcctggctaatttttgtattttttggtagagatgaggttttgtcatgttggccaggctggtctcgaactcctgacctcaagtgatccacttagtattattatgaaaatagttttgatggccaggcacagtgactcacgcctgtagtcccagcactttgggaggccaaggtgggcagatcacctgaggttgggagttcaagatcagcctggccaacatggcgaaacctcgtctctactaaaaataaaaaattcgccgggcgtggtggcgcatgcctgtaatcccagctactggggaggctgaggcaggagaatcacttgaacctggtaggtggagcttgcagtgagctgagattgtgccactgcactccagcgtgggggacagagcgagagtccgtctcagagaaaaaaaaaaaaaaagaaaaagaaaatagttttgatgttacaagactgcctagaatggtgtctgcagaccacacttagtgaactgttgtcctagcgcttagtccctcaaggcgagaagaggctcacaagttggactcacatgtgatcctacagctctgtgacatgcttttcaaaaatattgtacaggataatgtaaatccatcctcactacaaagaaagctcaaacagtacagaattaaagtgaaactttcttggatttctctgctttttcaaattctgctgtatcccaggttaacattagcagtttgctataagtccttacataatttttatgtgcatggacgtcttacgtacataacaaatggcatcatacggcctgtattgttatattattttcccttggattgagttacttgaaatgtctggtgtttactctttagtagccattattccatcgtagaatgcacatattttaactatttccttattagcatacactacagttgttgccaattttttctttttgctattaacacacagatttagtgaataccatttcattaaacatattttttaagtgtatctgaaacattctttttattgatgggaatgctaagacatagagtatgaatatttaacactttaataatttttgccaaattacgttccaaaattatacttctgttaacagtacttaagattgcccatttttctgataacattcattgatgttgttagtgtttccgatttttgccctttacttaaagtcagctgctgtattcttagcacagtgctttctgtgacagatgtttcagatgacagtgcttcctgcctgcaggctcatctgtctgccctggtagctttcaggctctcaggcaccctccctaatggaccgactggggtcaagggctctgaaaatgctgcccaccctggcccaagggcctcctgaacaggtaggctgggggtgggggtgagtccggtggcttagatgacaaatggaggtagaggacgcattctcgcctgttatttcgatttttttctctcctcaccctgaccgtcacgttctcaccttttccacctcaatccccagtcacactagcttcccaggattaaaatggtctctctctcatgaaacttgtttagaaatctagaagcattaaaaaaaggaaaaaaaaaatctagaagcatgcacgtggcttagaaaatgcctttgtgttgccagatgcagttcccttgctttgacagtggcattcaatgtggtcttttaaaaaaagaaactatctattcctttaacatttttttgagataataattacatacagtgaaatggacagatcttatgtatataattgagtgagtattgaaaatgtaccacctgtgtcatcactgcctccgtcaggctgcagaaagtttccattacctctggaagttccttctcgtcccttcaatcaattcctacccccgggagacaagcactgttctgatttctattaccataaattagttttgtgtgttcttgaattgtaaataaatggaattgtactgtgtttattcttaaattgctgtcatcttttgcccagggctgggactaggggggaggcgagagagtgtgggatctacactgcacaccccaagagtgagattctccgagcaatcacctcctgaaagtttgtacgccggcatctctcttgcttcacccttgtcctggccctgcttttggacaacagagtgcttttgaggttcagccctgttttggggagatgagtggtacattatattttatttttattatttatttattttttgagatggagtttcactcttgtttcccaggctggagtggcatggtgtgatcttggctcactgaaacctccgcctcctgggttcgagtgagtctcctgcctcagcctcccgactagctgggattacaggcgtgcgctatcacgcctggctaatttttgtatttttagtagagacagggtttcaccatgttggccaggctggtctcgaacttctgacttcaggtgatccgcctgcctcagcctcccaaagtgctgggattacaggtgtgaaccaccgcacccggcccagtggttcatttttaacttgtacgaatctgcttgtttgtttccccgtttgctgtccgaggacatctgggttgtttcccagtagctgcctcttgtgagtatagctgtggttaattcacatccacatctcatgtgctcctatgtttccattctctcgagtgagcacccagaagtcaaattgctgggccttttaatgagtacgtgtataacttcataagaaattgccaaactgtcttccaaggtggtggtatgattttatgctcctacctggaatgtatgagattccatttgcattatattttcaccagtatttggtgtggctgtttatttttaaaacatcctttatttattccagcggttgtgtggcgttaccgacttttggctttaactcacgttccctaatgaccagttccctagtcagtgaatatgttgagccctttcttttttttttattttaaaatttttatttgagacagagtctcgctctgttgcccaggctggagtgcagtggcgcgatctccactcactgcaagctccgcctcccggattcatgccattctcctgcctcagcctcccgagtagctgggactacaggcgcccgccaccacgcctggctaattttttgtatttttttagtagagatggggtttcactgtgttggccaggatggtctcgatttcctgacctcgtgatccacccgcctcggcctcccaaagtgccaggattacaggcgtgagccactgcgcccggctgagttctttcttttgcttaatagctttgttttttatttttatttttatttttatttttttattattattatactttaagttttagggtacatgtgcacaacgtgcaggtttgttacatatgtatacatgtgccatgttggtgtgctgcaccgattaactcgtcatttagcattaggtatatctcctaatgctgtccctccccgctccccccaccccacgacagtccccggtgtgtgatgttccccttcctgtgtccatgtgttctcattgttcaattcccacctatgagtgagaacatgcggtgtttggttttttgtccttgtgatagtttgctgagaatgatagtctccagcttcatccatgtccctacaaaggacatgaactcatcattttttatggctgcatagtattccatggtgtatatgtgccacattttcttaatccagtctatcattgttggacatttgggttggttccaagtctttgctattgtgaatagtgccgcaataaacatagctttgtatctgttccttgggaagtgtctgttcttagtcttttgggaaattgtattggtttgctttctttctattattgatttttccaagttctttattctggatacaagtttttcatccagtgtatgtcttgtcaacatttttgccctgtctgtggcttgtcattttctttagtttttaaattattaaaatatacatgactactactgtaagactgactgttgttcttttttttttttttgaggcagagtcttgctctgtcacccaggccaggatgcagtggcgcgatcatagttcacagcagcctctaactcctgggctcaagtgatccagcttcctgagtagcttggaatacaggtgtgagccaccacacctggctaattttttctcttttgtagagatagggtctcactatgttgtccagactggacttgaacttgtgacctcaagtggttctcccacactggcctctcagagggctgggattataagcgtgagccaccatgccctgccgcttgtctgttttaaagtgtttaatttggtggtttttagtatatttgtaaggttgtacactcatacctactgtctaattccagaagattgtcatggtccccaaaggaagcccagttggccgaagttccctgttctcctttccccagcccctggcagtcactcctctgctctttgtctctgggtttacctgttctggacgttgtgtatcagtggaatcgcaccataggtggcctctgtgctggcgctttcctctcagcacgttctcaaggggcgtctaccctgtggcacggatcagcgctcccttccaccacatggcacgtggtcataccccattgtgtcatcagagctcatttcagtgacccattcatcagctgtagacatttgggttgtttcactttctggctattacgaacattcaagtacagatatttgtatgagacctttttttttcacttctcttgagtggaaacactgggttacatggtagctctttcttttttaggaattgccaaactattttccatagtaactacaccattttacattcccaccagcagtatatgaagattccggtttctctgaatttttaacccttattatgatgtcttttttcttatggttagcctcgtgggtgtggagtggtatcttaaagtggatttttttttttaatgactgcatgatttttcattggatggatataccataatttaaacaatgacttattgtgggacaaaaaattatttccagttacattttatgatcttcattgtttatatcagtagtagtttatttttttaatgggattttattttttatttcaatagtttttggggaacgtggtgtttgattgcatggaaaagctctttagttgtggtttctgagattttggtgcacctgtcacctgagcagtgtacactgtccccagagtccattatatccctcttacacctttgtgtccttatagcttagcttccacttataagtgaggatgtgagatgtctggtttttccattcctgagtttcttcgcttagaagaatggtctccaactccatccacgttgctgcaaatgccattatttcattcctttttatggctgagtagtattctatgatatatatatatatatagagaccacattttctttatccactcggttgatgggcatttaggctggttccgtatctttgcagttgcaaattgtgctgctgtgaacatgcgtgtgcacgtgtctttttcgtagaatgacttcttttcctctgtaggattgctgtctcaaacggtagctctactttcagttctcgaaggaatctttgtactgttttctgtagtgattgtactagtttccattcccacgagcaatgtaaaagtgttcctttttccaccacatccacgccaacatctgttattttttgacttttaaattatggccattctggcaggattaaggtggtatctcactgtggttttgatttgcatttccctgataattaatgatatttagcattttttaaatcttatgtgctttttaatttgtatttctcatggctaacgtgtggaaacgtcagtggctgcatagaacagagacacaaacattacagaattagttcagaaaagtcatgaaacaagtaaaaaacaactacagctggcagcaccagcagccagccctggcaagggcagagaatctgattccagagttgccgcaaaattcggaagacatgcaagaagcaagaaagtataattcatacatggtggagaaagcaatcaatcagtagaagcagaatatcaataaaaagaaactataaggagaaaccacatagaaattctacagatgaaaagtacagcaactgaaatgaaaatttggtagataagctcaccggcatatttgagcagcagaagaaagaatcagcaaacctgaagataggtccgtcaggattctccggtaaggggaataaagcagagagagaagaaaaatgaagacaggatacgtgctttctccacttctgttcagcattgtgctggaggctctacccaggacgtttatgcaaggagaggaaatagaagacatccagattggaaaggaagaagaaaactgtctctatttgcagaagacatgattttatacattaaaaaactgaaagaatacacatttacaaaattattagagctaataaacaagttcaacagagttgcaggatacaagatcaatatttaatattatatttaatataagataatgtttaatattatacgttagcagtgaacaatctgacaacaattattatccccagagatattttgtctaattttctcattggcattttgctttgtttcagatgctacagaaacaagcccagtttccttgacagttgcactatttttattacaaaacctcactagacatttcacatttgaaaactctcagtcgtaaattaaccatggccatcaagtctctgtgatctgtggacagttttttgtttgcctctaatgcttgtctggaagttcggcatgctttaggctagatgctcggtcttaagcaaaggccagtctcagaatgaatattagccagagatttcctgagatacctagaactggtgagtccttgatgaggagctccggtgcacgctgggccaggtggtggccactctgcctttgccctcatttcctgcttgctcagagcttcaaggtgagcaggagggagaacccagggccttcacaggcctttccgagcctgtgcgcaacatgcacggacatggccccttagaatctcagtccccatggacagctcatttcttagcttttctgtgtcagcgttctggtgagtcttttgtttgccactgctgtcactcaggcatttgtgatgttgaagtggttgacagactcattccccaaccaagtttttgccctgggagagattaggggaggtgaaatcaagacaggactttctttcttttctttttttttttttttgagacggagttttgctcttgttgcccagtctggagtgcagtggcacgatcttggctcactgtgacctccgcctcccaggttcaagcgattctcttgcctcagcctcccgagtagctggaattacaggtgcctgccaccacgcccagctaattttttgtatttttagtagggatgaggtttcaccatgttggccaggctggtctcaaactcctgacctcaggtgatccacccaccttggcctcccaaagtgctgggattacaggcgtgagccaccatgctcggcctaagacaggacttttaattgggatcttaaggtagtaagtgacccagatgggtcaagtaataactcttctttgggaatggtattttgagagatgccagccccattctgttccctctgtcctgggaatgtagagtgcgatttttcttttttttttttttttgagacagagtctcgctgttgtcgcccaggctggagtgcaatggcgcgatcttggctcactgcaacctctacctcccgggttcaagtgattctcctgcctcagcctcctgagtggctgggattacaggcatgcgccaccatgcccggctaatttttatatttttagtagagacggggttttaccatgttggtcaggctggtctcaaattcctgaccttgtggtccatgtgcctcggcctcccaaagtgctgggattacaggcatgagccaccgtgcccggtctagactgatttttcaaggccaccatggagttgtggtgtgggggctgggaccagggtgagttaaaatgccccaggcgcactcttcttgagagccacctgattttcttgaccaaacgttcccggattgctgtaagcctttggttagttttcagagttcaaaaatctgattctgaccgttttagtcactcttctgttgcttttatggtggagtgaacttccataggctcttactctgacatttttactgagatcttaatggtgttttggatgagtaaaaatttttgattttgatgaaatccaattcatcaattttttcttttgtgatagtagtttttcttttcttttcttttttttttttttgagactctgtgtcgcctaggctgaagtgcagtgatgtgatctcagctcactgcaacctccgtctcctgggttcaggtgattctcctgcctcagcctcccaggtagctgggattacaggcgcccgccaccacacccggctaatttttgtatttttagtagagacagggtttcgccatgttggccaggcttgtctcgaacttctgacctcaggtgatctgcccgccttggcctcccagagtcctaggattacaggcgtgagccatcgtgcccagcctaatttctgtgttttaagaactgttccatttcatggttgcaaatttattttatgttttctacctgtacatttgggtgaattcccctcttcttgaggtcctcccagtatcctgaggttcctgtctttccagcaagtggtcttaaccatctggaagatgggagagttttgttgctgttggctgcatgtgcaccgccatctttgacccttcagagtagtttgtcatgctttattgaatgagcattgttctcagatgacacgcaggtaaggcactggttgtacggtttgtccaattctatcacgttaaaaaggaggaaaggttcttattgaacctactgctgtgaaaattaaggagactcagtaagagtttctgaattctgggataccagtgaaggtcaaagatcatttgaaaatatttcgtttttatcaaagctgagttcaacaaattgttgtaggttaaatagcttaagaagaaaaggcaatgacttccccttgtatccagaaaatagaacataaaaccagcatccacaaataacctcagtaaaacttccctcttcagttcatttagttctgtgtaattaattcttatcctgttagatctagggtttataaactcatgaaaccattgcttcttgcctaaagtgaatttggaaatgtggacttaacctcctggtgtgtttgaaagtggtgtaagggttgctcttgcctccagagcctgtccccacaggtgtcagtcatggcgatgtcggctgcagtccttctccagagccactgagactgcccttcttgttgaagatgcaaactctggcctgtgagtttatcccgagctttcaggcaggcgtttacagagtcgagcagaaacttttcacagatgacaaagacttgatggcaatggttaatttcttactgataatttttaagtgtgaaatgcctgatgaggttttatataattttcaaacatgaaatgtctgatgtggttttaatagtaatgcaactaatgaggaaattgggttgtttctgtggcatccaaaacaaagataaaaaggcgattaaaaaattagacaaaatattactaaggataataattcagcctgtttcaaagaagtcagtggatgttaacatctgattcattgaaatgggtgaacataatttttatgaagaaaacagtcttgagatgtacaatgttgagacaaaatattcccggaatataccaaagcatatcaaatgaagagactgggtaagtctgagatagagtgaaccatttttaatttcataaaacctcatgaatacatctgctgtacatgaatgcatagcactaggccacttgagaaccagtggcctagaaagtgccagattcaaattaaagaagtaatgtggctaatcattttaggtcattgaaattgtggctgtaacactatgttgttactgcctgatatcagggagagcacttgaaggactcggatacagaaaaacttgaccagactatttcataagcattttggtctgtgtttctcctgacattaaaacatattatggaatgtgaaggcattgacagatctccagggatttccactgaagcgcaccatttctgaaatacgtcttttaataacatattagcgattcacagttcacctggagaaggctgggtgtctcttctgatttcacaaccctggccacacagctcaccaagcaaacagttattactagcgtatgttttttagaggagctcttgcctatcttttgataaatttaatcctaagaattttgtattattgatgataatttgagtagaattttgaagactgtcacctttccaatatttgctgttattgtatagacacagtatagtttactatgttgacagtgtcctgtgactttgctggattctcgtgtatagagacagtatagtttactatgttgacagtgtcctgtgactttgctggattctcgtgtatagagacagtatagttttagtgttttgacagtgtcctgtgactttgctgaattcagtcttagtgccagtaaatttttttttttaagattccttaggctttttttgtataaaaatagtgctatttgcaaataaagacaatgttactccttcctcttgagctttataccttttgtttcttttttatcacattattacattggccgggacctctggtacgacgtgaaatagcagtggtggtagcagatagcttgttcttatttttgatctgggggaaaatgttcaatatttcactcttttatttatttatttttttcctggagacggagtctcactcttcacccagtctggagtgcagtggtggaatctcggttcactgaaacctctgcctcccaggttccagtgattttcctgcctcggcttccgtagtagctgggattacaggcatgtgccaccatgcccagctaatttttgtattttcagtagtgacgaggttttggcatgttggccaggctggtcttgaactcccaatctcaagtgatccactcaccttggcctcccaaagtgctgagattacaggtgtgagccaccgcacccagactcatccttagactcgtatttaattaaagaaaatgtacaatgcagacaggatggctgatgatagtccttttttcctgcctgattttggttatttgtgctttttctcttctctcttaatatcttcagatgtctgcaactttattagccttttaaagtaactgatttttgacttggttgatttctcaccgttgtagtttttccatctgtttttaatctttatttcctgtctttgggtttattttgcatgcttacaaaacttcctgggtgattgtgtgggatggcctggacggaagggaccagggcttcaggaggaggatgagccccaccctttctgtggtgggaatgcctgagctctgttgggctgcacatggctcctactttggcagtcattcaacaagcctgaggaatgtggcttactggtaaaatagaaaagtatgttgccagagtttttctaggaccagtttgggggatggagaggatggtagattgaatacatacacctacctttttctttctgaaacctcatactgcagtgagaagtgtggtgggttttttttttttttttttttttttggcaaaggttcatgtgaataaggagaaagtaaagtcatagcattcctatttcagaagctggaatgtaattggagagttggtgatggacttagctgacttgagaaaaccaaatgctaatttgggagtggggaaagctgagagctagcttgatctgtgctgcagagttttgaccacgcttgggagctgtgactgcttacttccagagtggccacacgaggacataagagtgtgttgtgagccggctgctcagaggccctggtccttgctcagcccagtgcagccggggcgggcattaggcgtgctgagcaggcggtaaagccgatggtcgtgcacttggcgcttttcgggacggggtgccttatggactacggtaagtgaactctgtgtgaccgccgagatgaccagctttgtccccactcagcattgagtctgggctggtggagcgttgtccactaagcaagagtagaagggcctcctgtggggactgagactatccagagggaggacagaaaggtactgaagtcgccacctcacaactctgttgccgtgaaacttacaggtggccgtcacagtcgctcattcagagcctcctagacatctgaaggagtctctgatgtaaaaggtatagaccaagcaaacagaaaaacagtgtagaggaaatggaaattatgcaaggataaaacttccaggaagaaacctctcataagcatcctcagtgagataaaagtggttattttaacaagagaagataatgaaacaagaaaaatgtcctctggaagaagcacattcagtgaacaagaagagttctgggaagttaaaactacatgaacagatatggggaaaaaatcagtgtaagtgttggaaaagttaaggagatccggaaagaaaaaaaagatcaaacaggagaaacggaatacactctgaggatcgggttctgtggaccacattcaacaagtaccgcaaagaaacggcggggaggacagcataatgaaacaattgaaaaaccctctcttgagcgtcatcctcttctagactgaaggagccaccaagtacccagtccagtggatgaacgtctgtgatcaaagaccattgccatggcatgttgctggaccccaaatatcagggtaaagacagcatcctacacaccttcagaaggatgagaataggttacatacgaagcgggaatcaggatggctttgtgcttctagacagcagcattggaatttagtgcacagtaaagcaatgtggtctagagttgcaggaaaataattttcagcctttgattctatacccagtgaaactaacagtcgcatgagagagcagactaaaggcacaatggagatttgcaaagtctttaaaaaagtcagtcatcctggccaggcatggtgcttcatacctgtaatcccagcactttcagtggctgaggtgggaggatcacttgagcgcaggagttggagaccattatgggtaatggtataggagagtgagaccccatctgtccaacaacagcaacaatagcagcagcagctgggtgtgctggcctgcttgtagtcctaggtactcagggtacggagggctgaggcaggaggatcgcttgagcccacgaggtggaggccacagtgagctatgaccataccactgcaccccagcctgggtggcagagtgagaccctatcttaaaaacaaattatctccctcaaatcttttttcagaaagctactggagggtgcattgtactaaggaagagagagactgatgactgaggaaggattggaacgcagggagcaggatatccgtcactgggggagaagcagctgaagatgatgcctgtgcccgggcagatggtgctcagtcctcagagcaggaagtggtgccgagaaagtctccccaaagacgagattgccaggcagcccgatgccgggtgagcatggacatctccagaggagatttgaacagtttaaagagccagggtggaatgagcgataaacagacagctaagcaagtgaaaaaccccttctcctgttagcttgaggggaagcacaaagtaggaaggagttggaagtcaccatggtttcctttgtggcctcagtgtgagtggttgagcacccagctgtgctcagctagacgcggggctcagccagacgcggggcagctagagctgtggtgatggtggtacctgcggggcggcagaggggtggtgggagcaaagagccatggcctcctcttccatcctgagaagtcacaggtaatgccccaaactgaagaattaggaaagtggcaatgaaagcctatcgtctagaggaagggaggtccgtttcaacataattgactcaaataacttagagtgtttgcttctgaggctgggaactgggccaggagatgcagagtggagttggggatggctgcttgccataacaagccttgtagtttgactatgtacactttgtttatgtaacttcacgaggaatacgtatacatggaagaaaaggagattcgactgggaatgccaggggcatgctagcaggtgctgtagtctcagccagaggcatgtgtgcagggtgcctggcaccgtctggggtcttctgtgcgcacagaccgcggtgtgcacgctcccaggagccatctgatggggcagcctcgagcacctctgacttctgacttcgccccacgggagcccatctggggctccagccttgacctggcagccagcagggctgggatgggactgcggccagccacgtgggttctcagctggttagggcctcggtcctctatcccttacctctgtcccacggagacccgtgcgagggcccatcaggcactcgagctggcaccacgaggactactgacggctttgctggatgctgctgggaagttgagccggccaaggtggcgagtggctgcgcctgggctgccccgtcctggcggcggcgccctcccgttttctgttctgggaagcacacggtgcaggcagtgtttgtgccttttcccagaggagccctttgtcctgaggaggcgtggatgttctctggagacccggggcctttcgcagcggcaccgtgacttcctgctgctgggccctgggccctgtgtggagtcgaggcctgcaggggcgagagtcagacgagagttggagtctggggttcacatgggattctgcagcttcccagcggtgtaatcttgggccagacatgtcccacccgagcctcgtgtgcttgtctgttgaatgggaagggtcgtggtgtctcgcaaggctgtgaagaatgaaagctgtgtggtgaggaataatggcagagaacactcaccaggccctttccaggtgctgctccaagcacttcctgggccttcactccagcagtcctccctgccaccctttgaggtgggggcactgttgtcatactcattttatgagtgaggaagtacaggcaggagaggttagcagctgtcctgaggactcacagccgatgagtggctgggatctgaacccacacagcagtgttgcattgccgtgtgctcttcccatcagacttaggcctcgtggtgatgagcttgtgtgtctatcccagggaccctccagatgtggctgatttctggcatctcttacgggtctggtcttgggctgcgtggtctcatggcccctttggcagcctgcatggtgccctcttactgggcacggtgaggcctcaggaacacagcagctccaccctccaactgctgggcttctctgctgccctttgcatggcggaggtgacccatatgtgtcccatctccaccctccagctgctggacttttctgctgtactttgcctggtggaggtgacccatacgtggcccatctccaccctccagctgctgggcttctctgctgtccttctctgctgtcctttgcacggtggaggtgacccatacgtgtcccatctccaccctccggctgctgtccttctctgctgtcctttgcagggtggaggtgacccatacgtggccctgctgtaatccgccaagcacttccgggggtgaggttgaggaatctttgtggggcatgtgtgcacgtgtgtgcatgctgtggctccagcaccacagtgttgacagtcctgtgagcctactgggtaagagcctaggttgaggcctgctgcctcctttggttgtgtggcctcaggcaggttatggaactgcacccatgttttcatctttaaattggggagaatgagagtgcccttcgctctgctggcacgatacgcaggaaacgttgcttctcttcagcagattattaggattctctgaaagttctccccagttctcttttctaccccattcattaatggcagccaccagtggcgtagcagcaaggaaaattgggccgttttgaagcactatcgagttctgcctgtcttgctaaatcatctgtgttccaactgtgctctttgaactgttgaaggccagaagttgttttgcgtttgatcacctataaccgccaaccccccatgtgtttctgcctgtgtttaactggtcacagggagcttggggctcctccggttcccatccttgggagaggcaggcccatccactcagtacccacggcaggcacctggttctcatctctgacgccccgactttcccttctcagcctgtgtcgcctttcctgtgatttcctctccttgccttcctgggatcctgctagttccagcccatccccactgccgctacgccacttggaaaccctttctcgtgcagtggccaccttaccgtccctggcttcacttttgcgtcttgcaactattcttcactccagcacttggagggatctgcctgagatgaagcaatgaccacgagaccctgctcaaagctgtttgtctgtccctgccgatgtcacgatgaagtcctcatgtctccatgtggctgaccagaagcctcctgccattgcctggctctcccgcttctctgtcaccctcgcctcagcctctgcaccagccacaccgaacatgagttctgtgctttctcccactccctctgccctcccacttgccctcccctttccctgttacggcccactccagccccgaacacttagtggctttgaacagtgcttggtaatttttcaggattctgcaggttgcctggggccaatctggtggcagttggggatgggacatccaggatggctttatgtgcacgtgtgctgccttgttaatggccaggaggcagggctgccttctttcctcaggggctctctctggctaggacgagctgcttcacgtggctgccaaagcccatagggacaagccctggcatgcaggttccttaagcctgttggttgtggttgcagtagctgtggccagagcctggcccgggtgtttgtggaagggacgacctgagggcacgagtccgggaggcagggccccttcggatgcattcatcatttagggtttatctgcatcctgtctcgtctcaggaagccttccgcaacccctccacccagactgtggtccagcccctgctccgagtgcccccagtgggcctttgtgctctcagtcctggccgacccctccacccagactgtggtccagcctctgctccatgtgccccctgtgggtctttgtgatctcagtcctggcaccttgacccgctgcttgttctgctctcctttaaactccatgcacctgacctgttaattgcacgcagcgcggagcctggcacctgcagtgtagacacactggccaccgctcagtgcaagagggcccctttgctaatgtgcacagctctttatgccttttttcctatgcctttttggattggagcaagagattttttttttccaagtaaagaacaatttatgttcctaaatactttttttccttgacatgacgaagttgagcaaggtggctatagaactttttttcttaattttattgcacaagtaatgttctttacaaagtagggaaatacagatacataaaaagaagactgccaatcccccgtaatcccaccagtcgcatccctacccgctcttaggagattccggtttacctttgtagattttcactgtctacatgcggactttaaaaggtgcagtcctgcaggcgaatgtgtagccgcctgcgtttgcgtcataggtcccgaatgtcctttctgccacacaggaggccatcccacgcttgtcctgtcacggatcgtttgcctcctgtgaatattcaggttgtttccggttcttcctgttctgaacagcgccaggacaagcaccgggtacacatttttgcattttaaaacacatttagtaactcattcttcagctggggaaaagcccacgtaagagcccatcagcaagtccgagcgcgtgttcctcccgcttcagccgccatccctggctccttagcgtgttcctcccgcttcagccacaatccctggctccttagcacactcggaataaaacctgagtcctcccggtggcctctgggccccacgccccgtgtgtctgccccctgctccaggcttgtgttcttcctccaccctcccagagctccttggtgttccggcctcaggaccttgacctcgtggcgccctccacgcgggagtatcgtcctgtgccttctcgcggctggttcacccacaccagccacatcatcagaaggaagagattcttaggcgatttttgtttgctgaaggagaatcacagatcaggatgaggtctcctggtcccttcctcccttttaaggacagataactgaagttcaggaaagcccaggccacacagcaggccagggaccagctggggccacagcccaggcctgcaggtgcatggctgttgcctttctagagttctgaggccttttctctccctttattgctcagcaagttcaaagaacatctcgctaatgatgcacctttttctgagtttctgttcgttaaagtcctttgttcccacattgcctttgattgtttctctagaagccagatttacttgattttcaattcactgttctttttttttctttttttagacagtctcgctctgtcacccaggttggagtgcagtggcacgatctcggctcactgcaacctctgcctcctgggttcaagccattctcctgcctcagcctcccgagtagctgggactacaggcacccaccaccacgcctggctaatttttgtatttttagtagagatggggtttcgccatgttggccaggctgttcttgaactcctgacctcaagtgatccacccgcctcggcctcccaaagtgctgggattacaggcgtgagccaccatgcccgtccaatttactgttctttactctgcaatctgctgcctctttgccaaaataaatctttgcaggtaagataggtgcggtggggagtgtgaaatttattacagaatggttattttgcttcttaaaaaatttttgttttaagaggcagagtcttgccatgttgccctggctggtatcaaactcctggcttacacgatcctcctgccttggcctcccaaagtgctgggattacaggcatacaccatcatgcctggtctaaaatattgtgtttttttttttaatttttttaagagatgaggttgcccaggttggagtgcagtgatgtgatcatagctcactactgcctcgaactcccgggctcaagtggtcctcccacctcagcctcctgagtagctggattacaggtgcccaccaccatgcacggctaattttaattattattattattattattattttttgagacggagtctcgctctgttgcccaggctggagtgcagtggcgtgatctcggctcactgcaagctccgcctcccgggttcacgccattctcctgcctcagcctcccgagtagctgggactacaggcgcccgccaccatgcccggctaattttttttgtatttttagtagagacggggtttcaccgtgttagccaggatggtctctatctcctgagctcgtgatccgcccgcctcagcctcccaaagtgctgggattacaggcatgagctgccgcgcccggcctgctaatcatgactaaaggtagaacagtcaggaatgtcacctgttatctctgaagtcatagtcccttggttttccctgacctgcctgctactgcgcccacttgcagcagcacctccgttgcccagtgaagcatgctgccctggtcttactgtttcaccggcactctcctatctgcgatgccactgtccacagcggggttgctttagggtttcgagctcacctggggccttcctgggttctagccccgtgagctacaggcacttctttgtaaaaggggattccaccagttaggcagattccggttcagtctccagcagcccggggcccttcctggaagagtgctttgtgagcggagtgcgccgcccaggtgtgtagtggtgcttctcaggcccatgggctgcccttccctgggcctcttctgtttgaggcccttgtcactgggttcgcctggcatgatgatggaggccctgcagctccctgccaggcgtggttccgcccaggtcattctcccggcccagctgctgtggacagtggacacacgctgtcacagcctcaggccggccgggccacgcctcccggaagcgggcctgcttgtgtgtggttgcatcccaagctctccacttgctgcccctgttctgagcttcttgccgaagttgtgtttggggccattatctagctttctttttgaacgtttaaagcattcaaaagatcagcttttccaaagagtgaggaaacagggagagaaaattatggcatttgtttgaaaggttctgagggcttttttttagcttgaacagttcaaacagcgcctcttgttaatcaggaatgttctggcatccctggggtggtcacacgggcttaattggaacccaggctgctttgaagcccttgagatccttcctgagctgggagaaagagtgcgagggcagcaactgtaaagccggcatttcttcattttatttacatgtgtctggggacccttgtaactcatgtccctgcagcagttgagccaagttgctgacttgtggacagctcagagagatgggggccagtttctggcaaaagagctgtaaaacatggcctgggtccagggctgcggcgggatcccctcctgggaggcgaggtctggatggaccacgtcacagtcgtggtggcgtggactttgctgctggcggcctgttcttgtcagaagtttccacatgggagaacgtgtggttttactgaagtcacttaatgagtgaccctaatagctctaagacgttcatcagtatggaccccaggacttacttcctctttcgcagagcatgtggacccacagtaaccacactggagttccaggcacaggtgtaccctgggggccggtcattctgcgtacacagacctgcctttgtcagcggggctgtgggcagcatggggtggccatccagccatggccatgttgctccaagccccaccgtggtcctcaggggcactctgtctcgccctgagcctccagccaccttgcccgtcagtctttccctgtacctcttggggatggggagtctgccacctagcaaagcacccacttgtcccaccccttccattctgttgagctgagacgcgtgttttggtcgtttcgtgccgtggacaccaccttggtttagtgaaacacggcgcagagtcccctctcccctggaccacgtttccccatttcagctccctgctgtgcacggctgcttcttcccgctctgcagagggtggtcctggtggctggagtgcggcaggcagcagcatcctcccatggtggctcgcatcccagagtgtgaccgtgggttcatgctgacggctcaggcatcccctgagcctggacactgaagtgtacagattgaggtgtgttgttggatgagtcatgacaagtggaacatgtgcactcgtccagataacacacttctatcagtccagagttcccggggtccccccagtccagcccttcatccccggcagctgtagcttagccttgtttgttgtagaacttcctataaattcttccctttctattttttttctttttctttttttttttgagatggagtctcactttgtcgcccaggctggagtgcaatggtgcgatctcggctcactgcaacctccacctcccgggttgaggcgattctcctgcctcaacctccagaatagctgggatgacaggcgtgagccactgcgcccagccgtatttgtattgcccaccttttgtttcgttgaatctgtgctcaggtgtcacctttccctagctagagccctttcctggccctcccgggtcaacatgcccccttccctcagcctcaggctttccactcttctccagatccggccactggatcaagccactgtcacctcctctgggccttggggatgtcacctgcccactcttgtcatggtcggcctcctcagcgagccactcagctctagctgccaaggactctgtctgtttgtccatgtagtgtccttgctgggcacacagtaggtgctcagttaaatttgttcactggatgcagattctgcaggcatcttcacagattatgctgatggagcaggtgtgccctaccaccatatgtttctacaattgatttttttttggtgcaactgtcaaaaaatttatttttcctctaccacccgcaacccccccccccccatttttcctgcttcttagtgtggttttagactctgattctgtcacttaacatatctgctgtctccatttgatgtgacctacaacctgataggcatgccgtctgcccctgctcgggcgatgggcgtgggcaccagcaaccgtcacaggggtccagggttttccactgactgccgggtgccctcagcgcagagctcctgcaggagggtcgaattgtctgtttcatagaccagaaaactgaggctcagctgggcccttcacctggctgcctccagagtgcgggctttctgctgtgccaggctgttctcttgcctctcccattcctttgcatcagtcggcactctggaacagtgcctgaggatgttagaatcaccttatgtctcctctggaaagaggccagtggatagagaaatatttatttctgatcttgtagtctctgtttatacagcggttcgttatacaagtaacctattgagaagaggacataggtgtctgcatgcatccgcttctcagtgagtccatgctggactgtaactgttcccattttcctgaggtggggggttgaggtttggagagctcagagtcacagattcgcaatgaatggacttagaattgagtgcttgactgactgcagacactaaggtgttaactctgctgcctctttatgcttgggatggtttgcagaacctgctttttgaaaacaagactatttacatgcacgtttctgttcccagtaattcttggcatggatgagggagatgctttgtgtcagattcgcatggtgaggagggggcagctctgagaggagccaggcccaggctgcctccagggcgtccagtgctccccaggcttgcctaggagagtgtcgattcctgctgcacagcaactctcatgaccaagtttaaaatgcattatacgtagaaaagtgtgcttctgtggctcacgcctgtaatctcagcactttgggaggccaaggcgggcggatcatgaggtcaggagttggagaccagcctggccaacatagtgaaaccctgtctctactaaagatacaaaaaattagccaggtgtggtgtcatgcgcctgtaatcccagctactctggaggctgaggcagaagaatcgcttgaaccgggggggcagaggttgcagtgagccgagattgtgccactgcactccagcctgggcgacagagtgagactctgtctcaaaaaacaaaaaacaaagaatacatactgtcgcctgtgtgcccattctcaagaaaaaggaaagtttctttgaaaacatgtggaccttccctagttccatcccattacgcccccaacccacactcccagagcaagcccctgggctctgtgatcactcctgagttttgtaaacactgtggtgctcactcagtcctgctccctggaggccttggccgcccatccttaatgtgccggtttgtgcctgttgcacgtcattgtaattacatcatttaattaaatatggaagctgatgaaaaataattatgtgtagagcaatgtttctgtgaagacaaagctgaatgctttggaaagtcccaaaggaaaattgctaaaaaattgctattgaataaagcaaatagtgaaagattatgaggaaaagttgtaaggtctgggaagatgacagggatccactttaaagaaacaaagctaacaatcatgagcggtgtgtcgtggacatggttcatgcaaaaaaaaaaaaaaagatgaaactccaattaatggactcatgttcgaagaaaaagtttgcagcttgaaagataattgtgtgtttttctgttttaagttgaaatgtttgagatacacgcatcatttgattcctcacttagccaacttctgggatccattacgttttttttttttttttttgtgagtggtggattatagataactttatttttattctttgtgttttcctcttttaatggattttttttaagatatcatttacccctttaagttggttttttgtttgtttttttttttagtatttattgatcattcttgggtgtttctcggagagggggatttggcagggtcataggacaatagtggagggaaggtcagcagataaacacgtgaacaaaggtctctggttttcctaggcagaggtccctgcggccttccgcagtgtttgtgtccctgggtacttgagattagggagtggtgatgactcttaaccagcatgctgccttcaagcatctgtttaacaaagcacatcctgcaccgcccttaatccatttaaccctgagtggacacagcacatgtttcagagagcacagggttgggggtaaggttatagattaacagcatcccaaggcagaagaatttttcttagtacagaacaaaatggagtctcccatgtctacttctttctacacagacacagtaacaatctgatctctctttcttttccccacatttcccccttttctattcgacaaaaccgccatcctcatcatggcccgttctcaatgagctgttggatacacctcccagacggggtggtggccgggcagaggggctcctcacttcccagacggggcggccgggtggatgggcaggggccgccccccacctcccggatgggcgggggccgccccccacctcccggacggggtggctggccgggtgggggctgccccccacctcccggacgggctggctggcgggcgggggctgccccccacctcccggacagggcggctgctgggcagaggggctcctcacttcccagacagggcggccggtcagagatgctcctcacctcccagacggggtggcggtggggcagaggcactcctcagttcccagatggggtcgcggccaggcagaggcgctcttcacatcccagacggggcggcggggcagaggcgctccccacatcccagacgatgggcggccgggcagagacgctcctcacttcctagacgggatgtcggccgggaagaggcgctcctcacttcccagactgggcggtcgggcagaggggctcctcacatcccacacgatgggcggccggtcagagacgctcctcacttcctagatggggtggcggctgggcagaggctgcaatctcggcactttgggaggccaagtcaggcggctgggaggtgaaggttgtagcgagccgagatcacgccactgcactccaggctgggcaacactgagcactgagtgagtgagactccgtctgcaatcccggcaccgcgggaggccgaggctggcagatcactcgcggtcaggagctgagaccagcctggccagcacagcgaaaccccgtctccaccaaaaaatacgaaaaccagtcaggcttggcggcgcgcgcctgcaatctcaggcactcagcaggctgaggcaggagaatcaggcagggaggttgcagtgagtcgagatggcggcagtacagtccagcctcggctcggcatcagagggagaccgtgcaaaggggagagggagggggaggggcaggggctccattatcgtcttgatgattctgggtaggaaaccttgcagtgatatattgctgccccatttatagtgccagttatttgcattgttatgcatagctgagcgtcagttaggaatgatagaattgttttgttacaaatgtttataattagattttctctgcattaatttgttgtgggaattatttttctttttataaaatttttatgtagtacctgattctgcaatataaggttgcaatactaggctttgaaaattacttattgaacagctattgtattttcttggtacagaatattgaaaacattcaaaaagtatccagtggctagcccggcatggtagtgggtacctgtaatcccagctactctggaggctgaggcaggagagcggagattccagtgagctgaggtcatgtcactgcactccagcctgggcgacagagcgagcctctgtctcaaaaaagaaaaaaaaataggccgggggcggtggctcacgcctgtaatcccagcactttgggaggccgaagcgggcagatcacaaggtcaggagatcgagaccatcctggctaacacagtgaaaccccgtctttactaaaagtacagaaaaattagctgggcatggtggtgggcgcctgtagtcccagcccctcgggagtctgaggcaggagaatggtgtgaacccaggaggcggagctttcagtgagccaagattgcgccactgcactccagcctgggccacagagtgagactctgtctcaaaaaaaaaaaaaaaaaaaaataggatccagtggcaagcctcctgccatgttcttgttctccagcaggaggccattgttattttcttgtttatcttttagattttttttttttttttgagacagggtatcattctgtctgtcacccaggctggagtgccgtgcgcgatcatagctcactgtagcctctgcctcccaggctcaagagatcctcccgcctcagcatcctgagtagctgggactataggcactccccaccaggcctggctaattttttgtattttttttgcagagacggggttttaccatgttgcctaggctggtctgaaattcctgggctcaagtgatctacccacctctgcctcccaaagtgctgggattacaggcatgagccactgcgcctggccagacttcttttgtgcaaaaatgaatcaacacagccatgcaggttttgacttttctgcacacggcagcatagcatacttatagtccgcttcttgtgtctgtatttagcactgcctttttggtgatctttcatgttaatataggaaaagatgtgtttttttcctcttacacaagttccattgtatggatagactacgacatttaacctgttataccgaacttttaatccagtggtctgagttcagtagaatgacttgcgtagcatttagtcggatagttactgttctggaatgatatgattttttttgctcattctcttagtatttattgaaaacgtattattgggccagtggaaaaaaacagaacaaaataaaaaacagtcccatgcctttctggagcctgcattccagtggagggggaaagacactaaataagcaggtagaaagatgcaggatctcagctggtggtgttctgtgaaggaggagagcaccaggaggagcggccaggagccagggctcaggtgacattccattgaagactcaaacaagtgaagagggggcaggccacgcaggcatctaggggtgcggtgttgtggaagagggctgtgcagaggacctgaggtgggaatgtggctcccgttgtgggaggttttgaggcagtgacgtggagaagcagatgcctcctgcacccctgtcctgcacaggcagtgtgtgggacccacatccccgtaggaaagtggttgctccctgtgggagtcacagcgtgacgagggtttgctgctgcgtgggcctttgggcttatggatggggctggagagtagtggtggagcagccaggcctgaaaccacaccttgcctgggtccctttccatggggtaagagtgacctttcctctgtctgctgggaagagtgtgagtggcatcgtctgccatgtggccagggtgtcacggagcggcccaggctcttggtgagagggactggtgccccatgtgaatcccctgacttggggttcctctgatcttgggaccagagagtctgagctccagcttagtggcctcaggctgggtgcagcaggtgcagcaggtgcagcctcaggcaggtggctcctgcagaacctgacccagggccgggtactgcacagcatggcattagtcccctgtcttcaggaaaacaccagctgctcctcccgtgttctggggccatgcatctctcccaacctggcgaccccacctttccacacaattgtgttgcatcagccagaaaagtccggctgacatgacgccctgttgcccttgtgactttgcagttgtgaatgctgattgtcctttggtttgtagcactgaggttttgctgtctaatgtattttattcctatttctgcatacttttcgcaaaacaagccctgcagagacagcctgtgtcgcttgggttgtgttccctgccttccgcagggctctggctggagccccagcctcagcagttttggactgtggtcctaggccctgtggatttctattctttgaaagcttgaggtgtcttgtttgctaattagtttgatggctgttgctgtttcattcattttccacctcggagtcctctgggtctccagtttttcagactcggtgaaactggcactttgggcttcagctagagccccaacatctgctattagccccaaaatagctgtggcttgggctggagctgctctcgcctcggaaggaaagcagtaggccggactccccacagccctctgctgctctgcgtgcagctgggcttgagtcaaaattcagctgcagatagaacaaaaagactttcttccccttgaaaacccaccagttagaatttaaaaggcttcgcagctgaagcccgcgtgttcagcagcagatgtcacagcttggactgcagttggaactgtcactgccgtgtcatctccgagctgaggctcctgaggcctctgaatgccttccactttgtagttggtgaagtgcgggtttcagaatggactgtcgggagttattcttaggccgtaataatacttggcacggctcctcctggttacgagcacttagctaatccccagagcacccttggtaaacatctctgagtagctttaaccacacacaggtcaggaggcttctggaaaataaacactcttcctgccagttggaggtgttggggctctggtcttggatttgatgtgtggcgaaggctgcaattgtttaataacccttcatgattcaacagctcttcaagaactttcctctgttcttgtgtggagctcgtgacagccagtggtggtggagctccagccctctcttcccacaggcacaagccgggttcctgagtcccagggcttctcgggaggtgtctgccctcctctttcagacaccctctgccctgtgtcccagggccctgggcctgtgctgcactgagcagagactgtaggggaccggctctcccactcctcccagatgggcagcgtcttccgtgtcgggagcatgctgtgctgcttttctcttctcagtctcttagtttttgcgggttcttacgcatgtgaggtgtggacttgcatggtggggagctcaaatggtaacatgaaggggaggagccctctgagtgctgtgatttgttccatcattaccgcttcctgatcacggtgacctgcactgctggagtggtcagtggagccaggcctccccacaacagtgttcccatcgccttcttactattgatttctattcttaaaatattgtattacttagcactcttttgaagacgttccagtatatatcaaatgatcaaaagtccataaccttgtcctacgtagaagccaaaggtgtcatgcagtttcaggtgttcgagtttccagaattcttgtgatgacatttgtaggattcttcttttagacttggaccaaattctgtaacctaatatttgtccttcagattgacagagaaccgcaggcagtgttttctctgtcacacgtgtggtgggtggcatcctggtgacataaagaattgcctttggtaacttgcccagaaggctgtagggttattttctgcttagactttcccctatttctttcttttcttttcttttccttttctttctttctttttttttttttttgagatggagtcttgctcttgttgcgcaggctggagggcaataccgtggtctcagctcactgtaacctccacctcccgggttcaagcaattctcctgcctcagcctcctgagtaggtgggattacaggcacctgccactgcacccggctaattttttgtatttttagtagagacggggtttcaccatgttggccaggctggtcttgagctcctgacctcaggtgatccgcctgcctcggcctcccaaagtgctggcattataggcgtgagccactgcgcgcccagcctcccctctctatttatgcagatgatcggtagttccggaagtagttgtgtgtaagaatcaccagggagtttgtgtgcagcccctaagccccgccttcaggggggtcttgattcagtggggtggggtggggcggggcaggctggagttgcctcagatgactctggtgcaggtggtccatgccattagcccgacgtcatgacgccacgcaccgtgaaaccatgcatccactgccctcgccacacgcgccgtgaaaccatgcgcccgctcccctcgccacacgcgccgtgaaaccatgcgcccgctcccctcgccacacgcgccgtgaaaccgtgcgcccgctcccctcgccacacgcgccgtgaaaccgtgcgcccgctcccctcgccacacccgccgtgaaaccgtgcgcccgctgccctcgccacacgcgccgtgaaaccatgcgcccactgtcctggttagagccgagcacatcctcgtgtcctgcgctttttgcagcaactgcctgaccacctttttgcccagcatcagctttaatgggtgttcagtgctcaatgttatggctatgaggacttgcttattttttttattgttgagcttttttttaaattaaaaactatgagatggagaaagtaagttggtgcagccacagtggaaaacagcctgtggtggttctcggaaaaaccgaaaaggggatgctctgtcagtgccgcttctgcgtatccacccgagatcattaaaagcagcgtttggaacaggcattggcacacccatgttcctagcagcattattcacaacagccaaaaggtgaaagcagcccaggtgtccaccgacgggtgagtggataaacgttgtgtagccacacaatggagtattactcagccttcaaaaggaaggagagtctgccacatgctgtaacatggatgagccttgaggacgtgatgccaagtagagtgagcccgtcacagagaaatgctctatggctccactcatgtggctggagtggtcgcattcttagagacggaaggtagtatggaggtggctggggctgggagcagaggggctgtgggagttcctctttaatgcgacagggtttcagttttgcaaaattaagagttctggggataggtgtggtgctggttgcccaataacatgaatatgctcaacacgacagaactggggacttaaaaatggttaagatggtatattttatgttaagtgtattttaccacaattaaaaacatcccaacacggtggcaggatgccaccgtggccaggtgtggtgcttgtcttgggtttcctcaggatgtcctcttggaagagcgtggcaggtcagcaggtcaggcctgaggacccccctttgctcgctctcttagcctcgtccttttggagggtccagtcttcctcaggtagcaagccttcttgccaggccacagaagccccaagccggaggagcggctctccggctcccgtgctgcttctccgtgcaagcctctctgagagctcacagtccacccctgtggactcctccgcgtgcccagagcctcctgggctcctcctccccaccccgcttggttcaagggtatgtcctttactccagatggtggcctccgtccttctccacaggctgctgttaatacgagaagagggcgccggaatgcttcctgtagagttcaggaggtgacctcctgacccgtttgatcggattccaccttgttcttgatgggacctcctttgtggcctcagaaatgtccacatgttggcaaaaccatttcatcttttctttttctgatatggagtgctctgaaaccattgccttaaacccattctgtttccactagctaaagctcatacacttcatccccagagagcccattttcttttatttatttatttaccatttatttatttttatacataatattttacatatttatggagtacctgtgatattttcttacgtgcacagaatgtggaatgggcaagtttagggtatttggggtaaccatcactttgagtatttatcatttccacgtattgggaaaaattctggttctcttctagctactttgaattatacaatacactgttaactctagtcaccctcctcttctgtggaacaactgaatttatacctttcatctaactgtatgttcgtacccattaactcaactctcttcatctgtggttccgctcacccagacctttcaatccactagttcctgtcattctactctctgcctttaggaggtgaatttccacagctcccatgagtgaagacgtgcagtttctttctgttcctggtggtttcacctgacacggtcacctcccattccagccacgttgttacaaatgacaggctctcattctttctttttttttgagatggagtcttgctctgttgccaggctggagtgcagtggcgtcatcttggctcactacaacctctgactccctggttcaagtgattctcctgcctcagcctcctgagtagctgggattacaggcgtgtgccaccacgcctggctaatttttgtatttttagtagagatggagtttcaccatgttggccgggctggtctcgaactcctgacctcctgatccacctgcctcggcctcccaaagcggtgggattacaggcgtgagccaccgcgctcggcccagctcttgttctttcttacggccggatagcattccactgtgtgtacatccccattttctttatccattcgtctgtcgatagacacaggttaattccgtatctttgccatctttgctgtgataaacatgggaatgcaggtatctttttgatacagtgatttcctttgagtaaatacccagtggtgggattgctggatcatgtggtggtgttctgttttcagctttttgagaaatctccatactgggttccatagcggtggtactaatttacattccttccaacagcagctgagagttccctttcctctgcatcctcaccagcatctgtctgtgtgttttttggtctgtttattagccattttaagctgaggtaaggtggtatctcattgtggttttgatttgcaattcccccgatgattagtgatgttgaccattttttcatatacctgttggccatttgcatgtcatcctttgagaaatgtctctttgtgtcctttgcctactttttcgtgggattatttatgtttttttaattgttgttatttgagtttcttttgagttgtattttggatgttagtcccttattggccgaagagttgacagatattttcctgcattcaagaggctgtctcttcactctgttgattgttttcttggatgggcagaagctttttactttgatgtagtcccatttgtctatttttgtttttgttgcctgtgcttttgaggtcttagctataaaatctttgcctagaccaatgtcctgaagtgttttccttgttttctttagtattttttatatttttgggtcttaggtttcagcctgtaatccatctccagttgatttttgtatatggggaacacattttcttttgattgacactgccgaacaaagggtatacaaaatttcacaacttttaacatgctggttgatgattgtacttgaagtgttttctcctcatgtccccggcgacatccagacaccgcctccacggtgcatgtcctctcccggcctcccaatgccagtgtgaaaatgggcttggattgcacaccctgaaaacagcctccagcctccctgtcccttccacatccataaagttaacggcatagggattgtcaggtaatagcagtgcactgtacctgtgccgtagggttttggaagtgagccttaggaagcccagccgagcaggtagggagttgagcctggaggggtcagggctggggctgagacccaggttttctcccatgggtccatctccttttcctttaaggatgtcctggccttccctctgtctctgcaagtagagtagactggtcccgtgtgacgttcttgaaggctgtcatcgagctcactgtgcttgtgcttttgagtggaagctgaaccctggtcatgagcaagaatggccagacagggctcgtgaggcttggtttagccaaagtggtgactgcgggtttttcagcgcaagaggctgcgaagggagggattccttctggtgcccctgtgccctccagcggcttctgcccgtgggaggtgttgggcacggctgcccctgtggttggagggctctggaatagcaagccctgcagcttcagtcctccctatgatgggggcctggtcgcatggggactgagagccggcagggatctgggggcctagggatgtggccagcaagtatccaggctgagagcccatcacgtgacagtgctcccgagggctggggtctgtgtgggaccatccgcctcaggcgccagccttctgcctcagggcaagccatgctctctgttcctgcctggggcaggacaactccaggtcacacccacctcaggcaaggaggagcgtgcaggggagccacccggaagcagcctcctgcagagtcggtgggaatgtggagagccagcctgctccttgggtgatggagatggatgccccggggctccagagtactcaggtttctcctgtggcccatcagtgccagaatgaggcgttgaccccatgacatgagacagaggccttcctgggtgacgtaggagactgcctggtgcgtgtgccatctgtgggcgcccagcacttcagaagagagctctgtcactgtcacttttcagttgatttgaaccactcccatttcccccctcattgctaaatggttgcatttatcatggtcttggcatcactgggaatcgcagaacatggttagcagagcctggccctctgagatcttaccccagctcccagctttgctgggtgggttcgtaccttggggcaagaagcttgtttctaaatcggtgtcaaatgctcctgaccctgccttctgctctgcaggctgcagggaggcttccccacagagggaggtggcaggcagtgtgccctctggtgagagagaaccatcccagctgggagaaccctggggcctggtactgcctgccaaatgcctctccactggcctcctgctgtttcaggtccagtgacatgtgaggtccctgaggggtgtgaggcggggtggtcttggctgtgtaggtggagcctgtagcctgccgcctgtgaccaccccacctgccgctggttctgggcacaggggctgggaggcgccgttgcagatgtggatatatgcgatttttatttatttgttgtaaataaattctttgcactgagttagtgaaaatttacaagcccctttgattaatgcaaaacaacttaaatatctcattcaaatgtttcagaaaaaatatctcttggcttggaaaggtttccttactttcgtactgatatttttaactccctgaggttggaagctttgggaaactggagagaatggtcacggcgttcaagggcagctgcacctttcatctctgtcctagagttcagtttctcttccaaggtctttcagtcataaatggtttttccacggagctgctttctaaccccggtttgcctgtgtgtgtgaggacagatggggtctccccggtgccagctactccttctgcacccatcgctgtccccactagatgttcagcaaggggcctgttctttgggtgggcagaggaggcctctctgggggacgtggaagggagaaggccgtggcgtgctctgtgtgaattggctgtggtcagagggagggcttatgaccggccctgggtgtgtgtgagggctcagggcctgggccaggccgcaggacatctgctcacaggctcttggtagctttgttccagtgatggaagacactccagaaacaccaaactaatgctgggcaaggcggcctccagctgtcctctgtgccgtgcaaaacaggcatgggatggcgaggggcgtgggggtggccagagacactgtaaggaagtggcccttcctctgtttggaggaggagctgggtgctggaagaccgggggaggggctgtgtgagcgctggatgagctgatgagggtttcgggggcccatgggtagggtgctcaagtgacaggaaaggtcagtggctgtctcagggcagagtctggtcgggcccagtgcgtgaggtttgcagcgtgcgcgttttaggcagcaggatggcttctgttaggggtccgtggttgcagtgtgcctctccgtggccgtggctgactcgcagagaggagctcccgggcaggctgctgggagggtgtgcccgggatccacccgaggctgctctgggggcctggctgacagagtgactgggacctctccttccaggggtgcaggtagcctccttggccaatgtcggggtccccgttgctcattcagtggtgcggtgcgggctccctgagtggggctgggtggggctctcacagcattgccagcgcctgctttctatgtggacctgcgcttggtccatgacaggtgaagagaagaacaaggatgggtcctcgggcctgagctcacatgccactgggtcagtctagccagggagccttggctttgtgccccaggttgtgaggctgggaatgctcacacaccactggcgtaactttgcatgcatggctcagatccttgctgtgtcctccggagtcccagcgttgagttagaagatgtggctcgggccgagctcagctgttgctgatcatcggggtgcactttgaactttgaagcggctgtttcacattggagtctgagtttcctcgtttaaaaaatgaaaacggtgaacaacagggttgctggggcattcactgagacaatctggaatcgtcctggaaagtagaaagcgctacacctggagatcgctgattttactcttgttgttatatgtgggtcttctgaaggagaggtgaggaaaggaacttaaaactcgctgagcacctcccctgtgccaggggcctggcgggtgctttttaaacatgatttcgtttcctctgaagagtgacactgtcaggtcgtgtctctgtttctacaggtgaagtaaaatcggggctttctaaggtcatctccccggtgttgcataggggtgggggctgtggttgaccccaggctgtagtgcgtgcatgctgccctggacctgggtccacagagttcacacatcctgggtcccagagcatcagctacagaggttgcttttggccttctgttttgtgtgcagaatcaggtttacttctcggggacagctggaactgagtgtgccttgtttatcctgcaggactccagaagacctttccagattcgtggttgagctgcagcagagggagcttgccttgaaggacaagaacagcgccgtcaccagcaggtagacctggccgcccagggtgcttgtggggatgcgtttgctttggagagttaggggtgagtgagagtgtgtgccccctggctcttgggggatggctgtccttcatcatgtggttggccctggtctgggaggagatgggggagcagggatttgagggaagggtttgccccatgtttccaccatgtgctgtgagcctccgctgaggcaccaccgtccatcgttctgacaatgtgctaaactgccatggggtctgggggttggcctcctgttgtggggtccctccttggatcaggagggttcttgtcttcccagcagggttggggcctcatgtggtcttgggaaccagcccgtcggtcactagcgggcccaccctgagtcttcacgtcagcatgaatgcaggcgtgattggaaggggctcactatgaataccaagagacatgcccctcactcaggaagtcccaagggcttcagggaacctgggatgacgatcagatatgtatttcttcttatcccacagcccggctcttctctggtttcgctcgtggctgtgaggggccatccaggctccggcatcacacccagaggcggaaatgagaggcctcttttttggatcttttctgtacaagaaagcgtttcctaggacccccactgccagcaagggccccttatgcctccttggctaagaaggggtcttatgcctgcccctgaccagaaggtggagctaccatgagggactgaaccccatccggtgggacctgtggggctggtgggcagtggggtgggcttgcggcagagggaagggccgtgcaacggggccccaggggagctctgcgccctgcacggctgaccaggccgtgggtctgtgcggagggcctgaagctcacctgtttgccattgatgatcaagctcagccttgtcctcctgtggagagagtgttttaataatttattaatagccagaaggaggtttcttattttgggggctgatgtcactttgaaaattggcttttagaagcatctggttgtgttggacataatcacatcaatttactgaaaaacctcaaatgataaagattgccttttgctttcaaagccgctgtcagatgaaacaggcattaaaagtgatttgaagttaaagcgttcacactttaccaggcgatcctcatcattttactttggaaatgaaacagaatgaactattaaaggaaaggaaagttgcctgtacttttctcccaccaaacagggaggtgcttcctaaaattatttgccttgaccagcagcagcaggcccatctctgtgtccagggccacacggaagggaacattcgcatctgcatgctgcccatgttgccttcgctgtggtcagagatgtggattgagcccatggggggattggtttgggaatggggtctctgtctcagggagcagcctctacagtgggcaggtggtcctcacaaccccagctgtggctggcctctcaggacctgtgggctccctctgagagctggggcacccgccctggggaagggtgagtcttggggcatcccatggacgcgcttggtgctccgtcctgttctgtgaaatggggtcttgggggtgagacgaggtcctcagtactgcgctggtctgggaggccaaagggagaagctgccctgaaatcctgggttctcacaagcgtttccagcttgctttcatgtgtgtgtctgtatgctggcttctgtcccacgtgtggcttattgccctgtgtgggcttctttagccaaggtgcaggctccagatggcgctggtcacccgtcgccaggagcgctggagacgcttccctgagatggggcagtggagaggcgcaggaggcctctgggcgtgaggttggagctcccggtccctcttgcctgcaggtcctggggggcggctggtctgctccttgctggtcatgtgacttgggcaggcacctggtcctctcttcatctctgtgagctgaaaggtactggcagtaacgactgggttgctgtgaggtctgagcctcctgaactgcgcctgggcactgagccgtccccgggtctcagtgctgcttgctggtgggtggacacttcccgaccaaggctttctggggcctggtgacgctgagtgcctggcccttttgtgcacttccaaggcccaggaaggaggcagaccctaggacaggcagcgctggcagtggccaatgaggtgtggatgagtcccgtcgtggccttggtgcttgcgttctggcctctgggctgctgctctcttccgtggcgggacaccgtgttcgtcgcggcctgccgtggcggggtcagggagcctcgcacggttgaacagctgagcacatttctacaagtctcttacaggcagttggacagaaattcagatgagcgtgaaggaggcggcatggcagaagatgggaggccacggtggcccagatccccgagggctttgccaggcgggcctcattttaaagtcacttttgtttgtttctcattgaaagtagcttgtagtcactgaagaacagagccctggtccagctgaggtcacgggtcatgagagcagctgctgggcattttccctcgtctgtgcggaccagcgggcacgtgcttgtgaccacgtatgttctcctctgcagtttttaccaagtatgttggccgtgtccatctttccctggtagtgaacgctgttctcgccatctgaggagcttctcagggtgcggctccactgccctgttcctcgtagcccagtgcccggtgctccctcttcgaggcggtgccctgttcctcgtagcccagtgcccggtgctccctcttcgaggcggtgccctgttcctcgtagcccagtgcccggtgctccctcatcgaggtggtaccctgttcctcgtagcccagtgcccggtgctccctcttccaggcggtgctgctgtgacggtgccgctggggtagctcacgtggcagcatctcggaatgcttgtgcctcaggccgagcttctgaagtgacggctgggtcattcgtgtgcctgttttcaggagcttggcttttagaagatgaatgttgcctatcagccggcgtagtgtgccgctgtgagcagcctacaccacgcagtcttgatgcacttcctgggtgttgtgtaactttccttctctgctgatctgatgtgcggaacagagcgcccttcccacagtcgctgtcttggtgacttggtgttcctttcaccaacatgacacatgtccacgtccgtgaagccagaagccagcaggtacctcagcaggtcctgtgggtcgggctcctctgcggagttcctgccgttgctgcctttttaaagtttgcctcagtttctctccatagttactgcagtagcattccagcctgtttcagggaggatcctggagctctcccacccagaggagttccaaggtagggaaggccgcccagggagggtctgatgtcagcttgccgtgcaacctggtgcaggaaacagatcatcccgcagtgagcagatgccgagccggaagccatcacctcccttgtttgaggaagagaaaatgacaccatatctcggagttagctgctgggccaccaaccagcctggagcaagaaggaattttcctagcattgagctatagttttgaccccttttactggtgaagcacagttccaaacgctgctgtgagctggactgaagtttctgtctgaatgtttctgcgctcttaggactggaggctggaagccccacggtggcacctgtgctgcattctggtcttggggctggagttggtagaggcaagaagcttctggaactctcagtgtaggacttactgctttccagggttgcgaggagcctgcttgttagctttatgcgggtttgctcaggtgctgcactggaattcctgtcttacagcagagagagtgtctgtggggctgcttgaggattcagcgggatgacgttggtaacgtgcctggtgcagcagctctcggcagtccccgggacgtggtgctgtgacgaagggtccggggctggctgtggagccaggagcaggcagggctctcagtgggcagcggggcagcctacagggcactggccgtaaggcgctccaggagggtggggtgcttgagtgcattgcagcctgggggttgggtcagaaccaccaaaccttgcctcctgtgtgtttctcccttcctttagccgtggacagatggggcgtcattggtcactggtgtgagcagagcgtgtcagagatcctgggcctctttaccttggagcaggagcttcatggcagtgtaggggagcctggcctggtttacgctcaagcctcgtttcggctcttagaatctgagaatggacctcctggttgtggggctgaggacagggcatactgttcagaatcagtgggtggatctggtgcgccctctgctcacgcttcacacagggcaccccggggctgccctgtagcctcccttccctttccgggccctcttagtctccttggcccttagggacccaagcacccctctgcctggcgtccccagctctgccgtgggaagagccgggacaggaggctgcagtcctctgtggcccagcccgtggccatgctgtcatctttcagatctgggggggaataggccagcgtgctctgagggctcgtgaagaacagggctgggaagctcgggcagggatgcgtggggccatgctcttggcggtttctctgctgtgctggaaataagaccgtgctttggagagggctggtggcgggagcggggcctctcaggaccccgtgagggctccagggttcaggtgtatcatctgtaatcccggcgatgaatgacgatggggacgctgagagcagtcagtgtttgtctcgcatctgccctcaccatgcgctgcgctgtgcttcatgcgcagcctctcacttgagcctcacagacgctcccagctggaagctcttatgattccctcttttgcagggaggaacttgagccccgggctaaacagctgggaggtggtgaaagcaggacgtgcgtccaggcctgtgggtctccagagctctgtgggatgtgtttgcaggtggctcctgggtccctgtgggacacgttgtgtggctgccgtctcggctttggccttgcttctctgcctcagcagagaccctgggtcatggatcctgcctggtgctgttttgcctgtttgaagccccaggcatcctcctcgatgctgacttaaggtagagccggctgagaagtccacagaggggagcccctgagggccgtggatgcagatggagctcttcatgttggggtctgccctggcctcccctgcctcccctctgtgcatcggctttcccagaagtgcattccagcctgggctgtgatcgccgcagtttgttttgaagatcccaccttgctgcctccaggcagaagagcccttggcctgaagccacaaggctggcatgtcctggagcacctggccgtgtggtgcttccaggtgcctgggcctggcctgtttcatctactgctgccatcaggggcctgggcagcgtcaggaggagtcaggcccttgtcaagcataagggactcgagagtcattgggtgtgatgagtggatatcaccatgttttctgtcacagacggtgcttttctgagcctcttcctgcctcaggtttctgtcacctcccaagagtgagtgaagatcagtttactagttatgagtctttcctgctgttggtcccaggtggttaggccgtcctctcaaggacgtaacaaggccttgtcacctggcatctgaattatggtgcacttgagtcatccagagaccagcaaggcatacgagatccatggtggctgggctgttcccctcttgcacttgaggggcctcccgctggagaagccaccactggcccaggttcctggggcctgtgtttgcatttggctctaccaggagtggctctccgagcgagtctttctggtgatggtgactcctgttgggggttttgaggctcagtgcagtcgcctctatggagcctgtggacggtgctggctcagggtgcaggtttttagctagtccttgtcatcactggcaccgtgtcctgctgtcactttttgaggtaatgggaaagtacaatttctgggagccttcagggcatggcaggggtaagttttccaggggactctgtggggcaggatgtctcctgtgtgtggccagtggtgatgatcagacgggttaggcggtgggggcatctgggaggtcaaggtgacggaatttgccgtggatcagtgtgggtgagagagcacatcgggatggccagttctggcctgcccttgaactgaccatggcctcagccatgtgttcccagcaagtctcatgctcaacctgaccacctgctctcggcataagggggcccctggggtttgacatggccagaggccttgttgcgtccgttcggctttggcgccactcgatgtaaatggtctttggcagaaggtgtggaatcagcctgagtctaatgggctgtctccatgtattccacggtggcagcctgccatgcctgtctggtccagggctgtggcagggcacgcgccaggagctctgggtggcaccgtgcccttcaccgtgggctcagtggcagctaggggcgctccgtccggcagcagagaacccgcgtgatctgtctgtatcctgctcctgtccccctctgccccttgtgcgtcccatgtggggctggtcccaagagtttctcccgcagccccggaccatgcctgggacgcacagtgcacctgcgccatagaggcctcagcccccaacccagccctgcaccaggggacagccttttgaggctccttgtctgtctctagaacggggcccttgatggcatctgctttcctgtggtggttccagtgcggatgctggcacgtgcctgccttgttctttggcgaaggctgctcgggttagtttggctagtgtgggccctttgaaaagccgtctctctcgtgagtcagttgtctgtctgtaggatagccccagtgagcgggtttttggggaaatgtgagggacatccctgtgcctggggtctggcaccatgcacttgaacatggacccctcagtgagtcaggtgccccagagtgcgctgctcaaggtgacaggggagcaggcccattctgtgctcacggctgtgcggtccacctgctggccggtgatggctgccccggcgaccctggcctggctggtggcctctgcctgtccttttggttctcagtccccctctcttctccactgggactttagtaggaaaagaggacttggcggcacctgtcccgggagccaggccatgtggaggagctgggccttccccaggctgtctgtgcggcacctgcctgcagtgcccagacttggacgtgagatggtgcctgtggcatgtgcagccgcccgctcctctgtgctcagcttagaacctcctcgtggggcctcctcagcgggggtgggtgggtaccaggcctgtacattttgtggccaattagagggagagagagaaggggggcatggcatggagatgtctgggtgagcgggcgtctgtcttggggcctccctccctcatgcggtgccttcttgttcctccagtcctttcctgatcagggctagtgaagtcccgggttgggggacatagacccggtgcccatcctgccaatgccgggttctctgtggccccccagtatggtctgggggcctgtctgaggcaccatcatgtttcaggctgcagctggctgctgggcctgagatcgagccccatctctcctgagagggggtccagcccatcctggctccaggggaaagcctgggtcatcagcaggcatggtcgggtgtcatggctgtgccccgcagcacgcggtgtctgcctgcttggaggggcctccgcagtggggcactgcgtggccctgtaggatgcaggcaggctttggcaaggctggccctgctctaggtgggtgtctgaacctgttccctccccaggcagagcccgcaaggcgagcacacgctccttcatgacggggccgggtccagcgtccgctgccgctgggctctggggtctgtccggggtgcctccgcctgctgctttagccagcttgtgttgcttctttcagcaagatgagctgccgttaatatttcacacccagactgtttccctgaatgttttgcatttccatatttaaaatggcatttacatattcatggctttttaaataagtttttattgttaagggatgtggaagtggatgaaatgtgaaactcccccttttattcaagcactagaaaaaaatttcatcccaaatgcaatcactttctgagtgtttagctctgtggcagttgccataggagattgttccagaagccagtgggtcccagggccatggagccgccctttctggcatgcagggactgggggaaggcaactgccatcagcattgctttccagccgaggttgggcatggaggcctggttgctccttggggtttctcctggcgggggcctggcctcgtgctgggatgcggggccggctcccacccacatccatggctcttgttttggaggaagtgtctaaggcagacgaggctcttcatcttggaagtggctaagccagggatgcctggcttcttttctcccttctccctggtcactcggcgtccctgccctggttggcctcttgctcccggctttgcggctgcggctgcagctagggcctcggagggccattcggccctggtgcactctccgattctgaggcgtggagggtggcaccggcacccttcacccttcagggtcctttgagggtcctgtgtaagaacatgtgcagggcggacgggggctgctggaggggtgctggagtcactgttttacgtttgggcagtggtgaatgtggctgagcctttgcctctgggacactggcctggggaaggcccagaggaagccaccaaggattgacaagagtgggaggccttgggagaggcgtctgcaggggccacctgggcttggacgctgtgtaggtgatcttgagccaagcacaggtcacagaaggatgcacgtcctgcagggaagtagttgagggctttggaagcctggccacctggcctgtggcgtgctgtgctgcagtggagcagggcagggactgggggggggcggggtccagatagtagaccataaaaacagggaaactgaggcctgtggggggaaagagactctacttggtggagtgaagcctagagcatggatttttctgatctgtattgttactttttaatatttttaggcataaaattgttttttatcatctcaggcctaaaccacccacaaaaccttagccttgagggtcgggggaagtgtggtccgagctgcagctggcctctccacgcagagcccctcacactggcccctgctggagccatctggacgggggtctgccgaagcccggcttcctcccccatcagccttgaaggagagtggcgggtgtcctctgtggctgtggagttctcagccttgaaggagagcggcgggtgtcctctgtggctgtggagttctcagcagtctgcctttggccccagcccctggcagcttctcccagcatgagtgttgtattttccatactctcagggtgctgggtcattggtagtgtctggttcctcctgagaccagaggcaggacacagagctcagggctgtggccctgggggcatggctgggggagtcaccttcactgctgagggtggggggcatctcagtgtgcgtcctggggcccgcagcgctcccgccttggcaagccctggactgcagcctgtgagctcagagggagggtggtcccgtgagctagggtggggtgggggtgcggggagggtgctcccatgggttggctgagagtacattgctggctcagggggtcgggccgtgtgatccccgtggcagccagggcttaggctgtggacatggtgtggggtgcttcctgggggttgggccctcctcacagtcctcgccctgtctgggtgggctggccacacaggagggtgaggctgaggcagcctcgcctgctcttcctcctcgcctctggcctcggtaccggggcgtctgctgaggaggaagaccgcttgtcctgctgggaccttgggcctctccgatgcatgttgactccagctgagaggtgttctccttgcctgtcctgcttttcatctggaaaatcaggtccaggactcttgctttgcaagatgagtggagaattgaagatttcagaagttcccaacatcaagcaggtgctcagggaatggcggcattgtttgcaggagtggggtctgtggtctctgtcactgggtcctgctcacttgacccccgagcctttctttcctcatttgtattagggtcagttccaccctcaatgggtttctttgaagggtatgtgcagcctgcctgggggaaggcagcggagtgctggccttcctctcagtgcttgcttggcccctgggcctggggttctcagagtgaggtgctgcaggcgatggcggtgtggccttgagagcgggggaggccccatctgctgcttcccctccggctgacttctcctaacaagccggaagtgtgcgtctggcattcatgcccccaatccccacctcttgatgtggttccttccgttttgtcagtaggatctgttttcaacctctgcatgctgaagtgctcatctctctaggccacttggtctggcgcccacctcgtcgtggttctcaggatgcctcatttcattaggctgagtggctctggactaagtgcacctgcagagctgaccgccccaccgccagcctgctgagcgctgccgcagccaggacggtggccagggagcacgtcccctggggcagcagatgcatccccttcctttctccttccctttggaccctgtatgcacccctgcattctctcaccctctttagcaagttaaaaaaaagctggcatttcctcccacccccatgaaaccctttgtaacagcagtctcaggtccgcagtgtcaggggctgcccagtggtggtgagagcgcagcgtgggtgcagccctggtgaagggcctgggactcacagctctgtgctctgatcatgggctggcccgcgctgtcagtacagaaacgccctgtgaacttcagctgccatcatggcctgtgtcgtgtggctggtgtcgtgtggccctcgcatagttatccgacatggcaccgtcggcacagaaacgctctgtgagcagcagctgccatcatggccggtatcgtgtcctcgtgtagttgccccatacgtccacctcctgcttggcttcccctctttggagcctccagggccagaggagcacagttcagaaactgctggtcaggagacctttcctggagaagtttctgttccggttgtggatctggcctgtgtgggagcctgaggtggcatctttgaggtgacccgggaccatggggaaagcgctctgtttcctggctgaggttttcaggcagtgccatggcacaagcctgtctgcacctggggctagaggtggcacgtgcaagtcacagaagggaaggaggagacagcctgggcccctcactcacctgggccagaggtggtgtgtgcaaggtgcagaagggaaggaggaggcagtgtgggcccctcacttgcatgggccaagcagaccggtaacatgcctgccgctctgtgacgtttctgttagagagcggaaggtgtctgacctcagctccccaaatcagaaaacggcatctggagtgccatatacgtttgagaagagggtgcttgggtcagttctgtcctttgcaagcgaacatctttcttggcccccaaaaggtggtagtagaatgtagatttcctcaaacatttggagaaaacacagaaatgaatactacttgaatgttgtttattgttgcttcaggaagagaatagggagatgggagaagggcccttgctggggttggtccctaagtattttggtgccctgaacttctgtttccttgcttattttgaaggggtttgtgtgagcctaaccccaggagagcagcccacaccccacagcggagcctagagcagggtcagggctgccaggagctgctatctggggagactgaggtggggtcctcgaggcctcctctctcatgcccggcactgccaagcccagggcatcatcagtggacttgggagcatcctcttatgaacgcttttcttgagtttccctgtaacttgttgtaaactttgtaagctctgagccaagagcttccttcttagccttgaagctggccactgccggctcctttccatgccgagctgggattcttggtgtgcaggtgtggagagcagctccggtgccatcaggcgattggagtacgctttccttccttgtttggcagaacataaaatcagtctcaggccctcccaccatggcctccactgctgagccccgaggagatgccaagagatgggaagggcccccaccgaggaatgcagctggctcagagtctgcctgtggagaacaggagcccctggaaggggcaggctttgggcaggtgagtgcacttggtctgagggagggtgttggtgttgccagcatcctgagctcgagttggtgccatagacctgggagggtctctcgatcctgttaggaaacttgggtaagagagtcggaacaaagaaacatccactgctaggcacctgtgggtaccaggcactccacacgtgtccccctgccctggcactgatcctgcctgctggcggggagcctctcgctttgccccagtttccccaaggttgtggagccactcagcctggagtctgcttgtgagctcagggctggctgtctcctaagcctgtgccctctcaccacgttgcctctcatcagggcgatgctttttcaagctcagatatcacaggtcgcttccgcagggcatgaagcctcttaatgctgacccttttttaatactgtggccgagaaacacagttgcgcagagtctgcaggaggaacagtgtggacgtggctgtgacaggcatttttggtcagcgtggggcaagtgcggcttcctgtttctgtctcattgagcttggagtggacataggggctctaggagaaggaaggctgtgacccctgccctgaaggagctttccctctgcctgggaagagaaaccagcagtgaatcccttaggggactagagagcgttgggccgcgtggtcctgatcatggccacgcttcccaaatgcctggctgcttgtgagttatatggcgaaaagagcctgaaaatagagatccttggactcacctccaaaggctcagattcaggtctctgctgaggccgttgctcccttcatgagtgtactttcccttgggcctgggacatgtgcacacacgtcaccatgagaggtggcaggcaggactcccatatgtggccgtgagaggtggcgagagctggtgggcattgtcccgagggtcgctgtgagagctggggggcaggaggcccggacattgcccaccacctgagccttcctctgcaccagcattgccctcacttgtcagtccaggcccctttaatgataaacaattaccgaaaacaaagagtttttatttgtggggaatcataactatcagtatttaccatctttggaaattaaaattaaaattaaatcattatttacaattatatttataatctcattaaaaacaattcattatcacttaacaaaatatatttatgaaaaatgcattttctaacacaaaacgagacagtgagaggaatggcattgttttttactttttacaaatctcttcagtgtctggtgaaatagaagatgggagcatctcgtgtctgcgtccatctgccacggtctcttcttttggagtctgtggaataagtctggccccgcacaggtgtgcagttggaagaaggagggcctagtggcctgagggccccacacacaggttctgctcagccttgcctgctgggtgggtgagggctgaaggcaggtgcgctcaccgttccttcacacctttcgtggctagtcttacctttctgggtagtgtttgctcaaaattctgattagattgtagggggtgttttttgtgtgttgaacatgaacatcattaatgaacgtcagtcattgaatgtctgggaaggtgtcctcagttctggtttttctggaaacggtgactcatgtatcctagaaaaggcccactttgcagcattccgggcagttgaaggaagatggctcaacccataagcagcagagctgacttctttcaggtgttcttgccctagatgagcagcaggggtgtccctggggcctggagatcatgcccacctgatttctggtggagccaggaacttgggcagccacaagttgctctctgagaaccccacaaatccaagactagtccttaagagagggtggcctctccagagacgtgtgcagctgctggacacaattgggctctggtgactggtcctgtttaaatgggcagatttttctttttgttgtcatagagaagctaatttcttattacttgtcaactatttccgtcttaaaaccaagtaagaaactagaagctttctcgctaagatcaggcacgaggcaaggagtcccactcaccactcctattcgctgtcgtactggaagtactagctatagtgcagtaagacaagaagagggaataaaggaaggaagaaataaaactgtctttgtttgcagatgacatgatcgtctatgtagaaaattctgagaactaacaaaagaacttgtagaataatgagtggtgagagagagcagggtatgggccatacacgccgtcagctgctttcctgtgtaccagcaacaagcagagggaatttgaaatcaacacccagtactatttacattagcaccaaaaaacagtgtagacacagagaccggtacaggttatgtgtgaggaaatcaccagacctgatgaaagaaatcaaagccgtaaatcaatgcagcggcattctatgttcacgggtaggaggagtcaatatattatcagttctccccagagggtctgtgcagtcccagtcagaatcccagcaagttatatttgtggatatcaacagattctaaagtttatatgggaaggcaaaagatggcaatggccagcacaacaccagtgaacaacaccggaaaactgacactccccgacctcaagacttagcgtaaaaccacagtgatcaaggtggtgcgctgttgatggaagaatggacgaacaggtctgtggaacaggtcagagagccacgagatagacccacacagatatactcggctgatcgtggaccgcagagcaaaggcagctcagaggaaaacggtcttctcagcaaatggtgctggaacagcggaacagccacaggggaaaaatctagacacagaccttacaccttcctcaaaaatcaactcagagtggatcacatacctgagtgtaaagcacaaaactttaaaactcctagaagatagcggcggaaatatctagctgactctcaattaggcagtgacttttaacgtacaacaccaaaggcacagtctgaaagaattgatgagatggacctcgttagagttggaaatggctgctctgcgaaggaaactgttgagaataaaaggagaagccccaaatggagaaaatatttttcaccgtcatgcaaaagacatatctgataagggctgttatccaaattatacaaagaactcttcaaactcagtggtaaggaaacagaccacccaattaaaaaatgggtgagctctgaacaggcgcctcaccaaagcagacacgcgggtgacggagaagcacgtgcggagatgctcagcattgaaaatgggtgagctctgaacaggtgcctcaccaaagcagacacgtgggtgacggagaagcacatgaggagatgctcagcattgaaaatgggtgagctctgaacaggtgcctcaccaaagcagacacgtgggtgaaggagaagcacatgaggagatgctcagcattgaaaatgggtgagctctgaacaggtgcctcaccaaagcagacacgtgggtgacggagaagcacgtgaggagatgctcagcattgaaaatgggtgagctctgaacaggcgcctcaccaaagcagacgcaggaagggggagagcagggagacgccaggctccctgtaacaatcatctctcctggtaactgatgaagtgaggactgctcttcagcatgagccgtcatgagggacccacccccatggcccaaacccctcctctcaggtcctgcttccaatcgtggggatcagttgtcaacctgagatttggaggggtcgggaaccacacagtaacagtgtccttccatgggtgaatggataaaagatggtatgtccattcactcaaatactgttctgagctaaaaagaaatgagctaccaagctgtgaaaagacgtggaagaatcttaaatatatattgcacagtgaaagaggacagtctgcaaaggcggtgtactgtgggatttctcctccgtggtattctggaaaaggcagaactgtggacacagtaaaaagatcggtggttgccagggatggacaagagggatgcgcaggcggacccagaggatttttggggaatgaacctactcttcacgcggccgtgatggtggacacgcagtcgcacgcagcagtggaccgactgcacgcggccgtgatggtggacgcgcggtcgcacgcagcagtgaaccgactgcacgcggccgtgatggtggacgcgcggtcgcacagggactgcagacatgcgttcgtctaaacccgagaatgtaagacatgacaagtgagcccacgtgtccactgtggacttgggttcatcagttgtaatgaatggactgcagtcgtgcacggtgcaggggaatctgcctgggggctgaagggtagatgagaactctcatttctcctcagttttcctgtaaacctataattgcttgaaaaaagaatatctgtaaatttaaaacaaaaattagcaagtaagatgaggctagagagagctgtcccaggggtcagattgagacaaaatgcagttggggccagcttcctcctgagtcagcctcactgactgcttggagaagagagggaccacgctgagcgtcaggaggcagcgccgcggcgggtctacgaggcacatctttcaccagcctttccattagaggcacctgagcagccctccatcatttcacgtgtgcatggtcaggcccttgtggggggctcacaggacttgtgtgactgccagttgccgaaagaaggaagcaggtcccttgtcatgaccagagagaccccaggtgcaatggctgtcacatcctgctgaccttcccagcctgagccagctcgggccagggtgaggacaagggctgatgggggctgaagggcacagagcacccctggggaggcgtgtgggcctgggggacacacctgagctgtccctgttgctgctctctggatgagaacctgggggcccagctggtgcaggcacgaatgttccagcacatttgtgaggatgagctgggaggccttgagcaaggacaccatcagtgcctgcgcagaggtcccctgggactgacaagctcgtcggggaacagaaacagcgctttgaattttaaattggttaaattccttttcctgtcacagtctcagctgctccctgtttccttagagagccagggagtttagtgtcctctcatctccatgctctgccaattttactgcctttccgtatttcctcaccatgaatagaactgattttatggtgcgtaagccatttttaatgtagcctctcatcacaaggtggagaagtgagggggattgtgcctctccagaccatagtacatgcgtcccttctgtttttaagcatttgggccaagactgcctttgcagattcctgaagtgcctgggatgagtgtttatcgtgtgcagggtccgctctggggcccgaagaaggctgacacgctgctcatccatctcttgaaggagctcatagtgcagtatgtcaacccaaaatactccaaagcgtccgaatctagtttaaagagagcttattcaagtgcaaggttcttccaggacggccaccagggaagcacagattccaaagaatggaagtcagtgttccgaagcgtggaagttccggatcatttatgtagacaagtttagggaagcttagcagatctcagcatccttctgcgagaggcttaatgcatcattagaaagatcggattcgatgcggtggcctttatctttccgggaaggttgatttggcattcgcactgaagatgtagcaggcatcttgtgccatctggtctgtaggtgcaggacagtgaaagaggcagtgaatccatcacaaagatcggtgactggaagtgggagaggtgtggtgtttggtctctcctagttatttacggaacaagagctaagaggaagagagagtcgcggacacgctcccagcttcggcctccggggcttaactttttccccctggcataataaactgagagggtcctgacattttattttcttttacaagtaggagtgataggacacacctttggaattgagtttatgtttggaatcattggggtcccagagagagagagaggcccaagactatgtgggaagctggtctcctttcccagacctgccgcagacgacgtagagagttaagctctggcctctcaattgcttccttattccaaatttctcggtctgttcatctggtgtgcccctggggaactcctgggagttgggggctgtaatggcgtggagagagctctgggcttggggacttggcctcgaggtgctgtgtgtccaggctagcttttctctagccccaggacgtggtgactgaaatatttcagcggggaggcacctgaatgctgctggcacagctccctggacctctcaggtgagctccatggctgcgcccagccaggcacctgctgcgggccgaaggcagggcagggaaatccaagaggagggcatttgcctcctgacatgtggaggtgcttttgatgcagtgaggcgcatcggggcagccaggtggcatttcctgcacccacttggtgctggagtctgtctgcctgcccaggtgcttttaaccccatccctgcccctctgttgggtagtgttttcttcacccttctgctgggccccagaaggacagctttttggactggttgggagcttcctggcagcgggtgccatgggaaccatgagtccgtctgcacctgctgacccagctgcctgcctgtgtgcccctccgacggtggtggctgtgttgtgcaccttccttgtgtgtagacaggatcctgggggaggccgttggctcgagcctggggtgcagagagcactccttggactgtctctgacatgcgtgtaaaaataactgcatttgtttttctgatctctgggcagaagctcgagcctgcgtgtccagctgtgtctgtcttgccaccttgctctcgtcagggagaccatctttgttagacaggcagcctccagagggatgggatcgtgtgtgtgctctctcctcatgacgggaggcacctggggttcctgtcctgctgcctcgtgtgtgactggactctgagaagcgcgtgttcctcgcgtcctcgtcactggcaggtgacggattcagacccacggcaggaggggcgctgcctagcaggagccgtgtggacaggagccgccgtgagcctgctgggtggcttggcctgctcgtgcctgtccacattcacagtcccgcggagacagaccttttactcttctatacctgccacagcacattcagatgtccacaggcaaaaacctgggctttccctcttccaggcgtcttgttctttcactccctccctgccccctggcctgcctggtgttggcctgctgcacatgtgagctgcctggcggtgggttagccctggtggccccagctcccccgggatcctgcgggcccctcatggaatgcgcctgcccggtccctgccccttccagctggctctgggactggaaggaatttccgatcagagagctgcctgcccacaaacccaattttgtcctcgtggtggggtcgtgcaccacctccactctgcccagttggtcagcgccagcagcactccccatctcctcaaggtccagatgccctgaagccttgggaaggtctgtgtccccctctggcttttctcctcctccctgtggtccgtgtgcctgactgccgcgtgggaagcctgaaggtgtgggagcagagagactgcagtgtgagctgaagatggggccttgtgctcctggggaggcgtggtgtggcctgacgggcttgagggtggccgaatgaaccttctgagggcaggtcccagcagccacctgtcctgtccccagggtgagaagggcagagggagccggtttcagcccctctgtgtccccgccaggatccctgcaatggccaaggccccagctgagccttcagccctcttgcagacacatcgtgttttctgctttgccgctcatccttccatgttacacagcctctggtggcgtgcctgtgccctttgcgaggcctctgggtgtagggactcccgtcagggccttccctcaggcagggcaggtcacctggcctctcctgaacggccatcttccagaagcagccttcctgttcgtgttctgtgctttttgtgactcccgtgctgatgagcgagtgtttcatgaactctgaactgcctaggtctttcacggtggtctggcctcctccgccctctctttctggcaccagggctgcgtttcggggactctaggcatggatggccctgccaggtttcagtagtgctgtttgggagatgagaggtggctgagctgctgatgacaaatgcgattcagtgacagaaaatgcagaataattagtctgggaccagagaactctaaagaatgtatgcaaaccaggacaattgtccggcttcatgagaaccatgttaatttagaaataatctgggagggcgtcagcagctcctcaacaggggatgaggccggaccagagcccgagttgatgagttgtaaccgacgactgtgatttaaaaagcgttttatttatcgaatgtctctcagtgtcagggcctttcatccatttgttctcatcatgaagttccgagaggtggacactgtcttaatctctcaggtgcgagcagaagtctcttgcttgaggtcacagccgctggtcggagtcagttcagaccggctctggggccattgccagctgcgtgcctgcgtgggtagtggggttctgaggccccagcaactccaccctaggctttctcattcctagcaggcgtctgctcccctgacgcccacagtgccggctgctcttgcacgtttcccggagtgcaggggtctttggtgggcgtgagattgtaattgcaggtgggttcctgcgggttcctcctctccgcaggtgggttcctgtgggtccgctcctctctgcaggtgggttcctgtgggtctcctcctctcttgccttttttccccaccctagaccccaggtcgtttctgctccctcattgcccacctacaccaggttcctgacgtctggaccttggtctttcctaccggtcggtgtggtcgggcccgctcccccgtgtgcagctgctcctccgtggcacagcacgaagcagcttcccaagaggctgtgtgtccattgccctcaggagaatcccctctggagcaagtgtgctgggctgtccctgctgccctctccttgccccttgggtgctccatcaggggccccactctacagcctcctgtgtcttgctggggctgggtgagttgccgctcctttgtgcccctctgatcacttcagattttcgtccatctcccccttgtcataagtaggggagggcggggacgtcttctctgtggcactcccatgactagcaaaggcccgtgggctcatgccagccctgagcacctctcttctggaacaagcgggtcaggccagcactgtggaagactgtccccaaagtggggtcactgagaggccccctccaggagagcgttcagatgtcttcatcccacccgcgtctgctctgttcttccctgggaacgaggcctcggatgtgcttcgtgactgaactcacacctgacttggcccgctggctttatcccaggttctcagttgtaatctgccgttgtttaaaatgccctactggatacatagaagcattgctgatcagctgatttgcctggcagtgtgagagggggttattcattctgaggtctgtggtttctaatgaagcccgacccatggggacagtgtcagtgagcacctgcctggcggaggctcgtggctcactgcagggttgacgacaggtgtaaagctgcccagcggtcactctgcttccttgcagaaggaacctactaagctgcatgtttaaaaactctgagtgacagaagaggccggtccccagagatgctcctgggcctcctcacactgcctttcagagctgggctgggcctgggttgtgcttggtcccaaggaaggctggcggcatcggcctgtgtcgattcttagtggccatatggtgcacaatcattgtgcctggcctgggctgtcaggtcaggtgtccccgctgccccccaggcctgaggggggaagatagctccgcagctgtgcacaggacctccaggctcctggggtccaggctgggggcctccagtggtctggtccacatctgctgccctggggttctgccctttctgtgcatgcccgagtgcctgtgtgtttattgaaaatggaattcgaagctgcccttgttaccatccccttctaggtggagtcttcaacctggggccctccgagggttgcactctgtgggcgtcccccgtccatgggccgcgcactgagccttgcctgtgtctgctctcggctcccgagacgctctccttcatcctgcccggtctttgcaggaacctaggccatatggcagaggtgccatccctcgcttcacaggagggccgcctggcaggaagtggcagtgaggaccgaagcctgggtctgtccccgagtccactgctccagcgccccgggctgcagccccacctgtggaaagcagcccatggaagatgacccctctccaggaggccgcctggccccactcactttctcacctgtggcgctgtaaacgtgaggaggcccaggggccaactggctgcttcctcagatgccagtgctggctcaacgcttaaaacagacgcgtaagctgactttcaggtagtccgttctcctgattttaaagcgggacaaatgtcaggagtctctcttgatattgtctcctcagtttatttttcagagctgtggtaaatgaccccaggaagcccttagctggaggtgggagctcagtctgagctgcagtttctggagcactcgtgctgcttggtgtctgggcgcctgcctctgggtgagagggccagtggctcactgccctgtttggagtcgtcagaaacctcgagccagcctcctgccggtgaggtgctgcctcacctggtgggggttgtagctagaattgggtttgccacagcaggccctcgctcacctgggcagatgagaactcgtaaatattcaaaggatatctcagatgccctgttacagtctcatcctgagtgtacggtggagctcgctcaccaggctgcggagacatcactacccattgttttgagctgtcgcccgggggacacatggggccagcatgaggaggaaggatgcgtgggtggctcggctcagggctgctgcttgtgtcctctttgtccccacctgggcatctgtccagtcatcagaaggggcaccacccccacccaccttgtcagcacctgcctcgtggcgccgcccccacccttgggtccaggacctgctggagtgcacctggcaacagtggcggtgacttgccctgctgctgctgtgccactgtgggctgcatgacccggggtctgacgcaacctttctgtggcaggtcctgtgtctgtaaagtgcagccctgacagcagggacttcctggggtcgctgtgaggaccggatccttagtgtgggccgggagcccagcagggaaggggcccgggatgcagagcaggaaccacctgcatccctgtgccctcagccatgcccatgtgtgtcctccgtgctcactggtgtctcctgccctggggctggaaggccgcctgcagctcctgcacccttctcaagctccagggaggcccgctggcatcactggccgagcccctgcgtcctccttcacccggaggtgcctctgttgtatgtgatgtcaccgtgcttggcactgagcaaggctcctgaattcagagtttctcccacaagcgccgggcacccaggtggaatggctgtctcctgacccagaggagggtggggcagggtgggcctggccctcccggggtgtgtgagaacccagcaggtctgcccctggggaggcgtggagccccatacgctccttgccgagctcagagcgggggcttcgtgacctcctctctgccagagtcttcctagccatcctgccctcactgcacccctgggcagtctgcctctgttggctggggtgggccacatgcaggccggctgtcccctcaggctgtgggtgcagctgtttcctcactagccctggtagcaggcaggccttctgcccactcatctcccaggtcttcttactctctgtcctgggggagcctgctcttcctttcggcacgttgggctcttcccaaatcagttccacgccccgtggtagttccacacccccgtgtctgtgcgttttgctcctgggcgagggtctttggagccctcgtgcccctggagtcttggaagaggcctgtctgggtgggcttgcctcctctccatgtctcgacccttgtgggtcctgcaccgctgcccgatggcctgcccctcctgccttgctgctctgcgaggtgagcaggggcgtggcgtggcctctgacctgtggagagctgggggctcccggctgcatctgtactgggggtactgagagccttcgccttgctcctggaggtgtttgcccggcttccccgtctagaggaggagcctgacctggctacagggggcttcccaggaagcagagttcttgcccccggggcctaagcccccgccccttgctgcctgggctgcctttgcttgtgtgcagccttgcaggactctggtgtatttggagaagctaaaaagcccttgccagagcggaaaagggcgctggctaattggcagctttatttatttatttctggcttgagtggtaaacagcgctgattctttgcacagcaggaacagattgggaggcatttacctgactgattcctcacctgcagcaccacgccgccggaggatctatcgattcagcgccgcctgcgaagtgcactctgaaacaggcttaattgcctccgactcgcttcctggtatcgcatgtccccgtgagtcctcgcttgagggctgctgccctccagcggattgacgcctcccatgcgtgcccttggcggggctggctcctcctgggtgctccctgggtggactggggtgctctcctgcttgacagggaaggaaaccctaccgtcaccagctcaagcgcaaacagagcccaccgggtgtcagccgccctcacacacaggaccagggcctcaccagcgccctctctccgtcctgcaccccagcccagtttcgcttgctgggagccctcccgcaatgtctccaagctgtagcgtgcagtttcatctcagtccctgagctggctgagctcccctgctgcttttttttttttttttgagatggagtctcgctctgtcgcccaggctggagagcagtggcccgatctcggctcactgcaagctccgctttccgggttcatgccattctcctgcctctcagcctcccgagtagctgagactacaggcgcccaccaccacgcctggctaatttgttgtatttttagtagagatggggtttcaccacattagccaggatggtctcaatctcctgacctcgtgatccacctgccttggcctcccaaagtgctgggattacaggtgtgagccactgcgcccggctcccctgctgctttttaagccagactcagcagaagggaggcaggtgaggtaccggtcgccttgataatacacttctctaccagggcaggatgggcagacggtgacggggaagctcacctgggaggggcgctgggtggacggcggccgtcaccacccacactgacgccatggcctgcacatgtgcagctctggacagatcctgcgccttgacttcccagctgcgcctgggggtgagctttagcaacccttcacccgtgcacctgcacaggtggcagtcgtggctctggcactggggctgacttgccagctgcttggaccaaggctgcatccttcctgcctgagtctcacctgcctggagcaggccagcgtcaactccctggtttgtgattctgggacctggtgattggctgtttttttttttgaaacagagtctcgctctgtcgcccaggctggagtgaagtggcctgattttggctcatggcaacctccgcctcccgggttcaagtgattcccctgcctcagcctcccgagtagctgggacctggctgattttgtatttttagtagtaacggggtttgtccgtgttaggctggtctcgaactcccaacctcaggtgatctgcctgcctcggcctactaaacttttaggattacaagcgtgaaccactgcacccagccagggattggctgttttaagtaacagttatcaaggtgctagataatattttaagacactttgaggtatgagattaggcaaggcacacgaggtggacaggtctgacgcgggcagtctgagcatttctccagcccccgcgggtttcctctgtcccagccctctggccacatgcggggtggccactgctccgacctctcttggtgatggcttttctgtggatgacatgagacagtggcagttctgcttgtccctccagacaagccaggaagacacttttaaaactcaaggccttttcccaagagttcctctgtccctccagtctccccctccccaccccagaagctacttttaacacccagggtcttttccccagtgtcttggtgcgtcttggctctctagcccttctgtgcgcctttgccggtccctcaggtgtccacgtgtccccacatctggctgctgcacgggtctgtgttcctgctgtgccagcccctgcccggtgctggagagggtggagagcgaggcagacacacctcaccgtctggagggacagtgagacagacctcacaggcctgcgagggaggtgggacatcatcaggctcgtagaaaggtgtgacctttccctccccacccaaccctcgaggactcctggcccccaggctctagtgctggaggctgagtttggccaccttggctctgggcccaagcggcctcctgctggcaacatttccaggatgccgtgatctgcagcatagtcctgccccactccctcccaggagcccagaggcctgttattctgaggtctgtggtttctaatgaagcctgacccatggggacagtgtcagtgagcacctgcctggtggtacacctctggccaccgggactctgttaacgaccctcccgtgggggctgtgaggtcgtgcctgccactgcccgggaggctccagctggaccgagtgtgtgtggcgtatccgcagcctccctcatccctgcctgtccccacggtgcctggcaggtgctgggggcctggtgcagagcctcgctctgacgctgaacagaggttgggagaggcggaggagccgcatctgggcttgtcctcttggcagcacccagcgcctacacctcacatggaaatggggctcaccagtgagtggagactcagatcgtgaggcctcaggcgggaagggccccagagccacctggtccagctcgtcctggtgaatgctgtggcggggcgcctgccctgggagcctgcgccgggagtgtccttgcggctggggctggtgtgcctctgcaggagccctgccgtcaccgtgcgactccacttgggcccatctccctcgagtccacctgtgctgtgatggcagccgcctgtcttccttgctgggcctccccacgtcaggtctgcgcctgccctagagcaggtgcaggggtgaagaccttcctcgccccgccctggaggccacaccagcctgttgggatccttttctgatccctgcctgcagccttggaaacggaagcagctcctgaggccctgctgtcccccgagttcctcccatgggggctcgcaggctgcctcccgcctcctgtcccgcaccccctgtctttcttggcatatactcttgtttacaagtctctctcgaagtgatactctcagataattattatgtttctgaaacgccttggttttgtgttgttggggaaacagagcaacagaagacacagttcctggctctgaggaagcctctgggtggggtgggcaagagtcagacccgtgggggcacggggagtctggcagaaggcagcgccctgggtgtggggcttccgcttggttcctgcactgcgagtgcctcctccctgtgccaggctctggaagccgtgcagattgcagggtggtgaccccaaggctgcgcccccaggctctccagggtgtggcggccagtcctaggctttctcagaaggtggtgctggctgtggaggcagaggctgctgcagcgcagccttcgttatcagctgggaggaagtggtggcgggtgttgagctgggtcagactttaggaggtgccatttgctgtaacatacaggcggggctgttggggtaagcacacgccgcagccagtctgtaaggaatggtcctgaaggacaggcaactggggaagggagactgtgttgggcaaagccagcaggtggagagggccaagagagggggaggtggccttaccatagacccagtgtggggcgtgggactgcaggaggctccacttcatttggaggagtgaaaaggcaggtgccacctggtccccagggagagctggagggcctgatctgaggatggagagcatgaactggggctcctccacctggggcattgctagggatgccttgggcgcatgctgggaggaggtggagtgaggaggatgctgagggcggctttcagggaataaggagctcctggttggatgcttggaaggaggggagatcccagatcagagtcctggaccccagcgaggagccagcaggaaagagcctaggggtctggaacagttgtcgtgggacgtgtgtggctgccatctgtgtgagctgtatgggtgcagccaggactgtgctgaggggtcccctgctggactggcaggctctccctcctcaggagcactctgggtttcggggtgcattgtcactcagcacaggttaccctccagagctccagccctctgtcctgcagctgtagcccacctgccactaagtcaagggcttggaggcctctgatgtctgtatgtgggtcagagctcgggcacgtgctgtccccacagtcgggacctgagagctgcctggggtcaacttgcacagggccaggaggatgtaaagagctgctcttgtggcgtcgtccagctttggccagctacagagagtgtgcgccccacgacagctcctgctcatcgcatctgggtgggagatggaggactctcaccccgtcctaaaccatgtgggccactgtcagaaagggtgggtgatggagatgcgatagggaaggcgctgcggagagccatggcctgggagcttctcatgtctgtgaaccaggggcggggcactcctttggtcacttgttttggggggataatggagagggagaggagggcactgggacaggagaaatgtcacagtagatgaaacacagcaggagtccaggctgcctggcctgaaccttcttgctttgtggaaacacggcttcaccaagagcaccgggcagcagtcaccctgaagccctggagctcgagcccagccgctcctgcttgtccgcgcaggggtctgggaggcagaccgtcacgtggggctggaggctggggcgagcccaggcagctgggcgtgtggagcttttggccttgatggaggacgtctcagctccaggtctgcactgcaggtcaaggagagagacgggaggcacaatcgcggggtggcttctcctctgagagcaggctgtgacccagacggctgtggaatgctagggacgtgtctgcgcgtgcctcacgtcacctgtgaaatgcctgtgagatatgacgtggcttttggagggatgtgcttagctggtggtagccccttatccggaaggaagactgtgagccgagcctgctccttggcggcatgaacctgccatggaggcagtgtgtgggcagcagtatgtgggcaggggctgggagggacggccctgttccttcacttccgtcacctgccccagggaacttggacatcgagggcctgtcaccaacaacagccttgatagtgcttgctggggagaaaatgctggcccagtgtgttgagtagtgtgtatcttgccgcgttcatgccacgcactacggatgctgggcagacccctgtgtgctcaccgcgcccacacggccaagctcccgtggctctgacacaccactcagggctgacctcctgcttctgggagcctgatggcagcacagggggaggtcctgctggtcaggagggagggttcacctgcacagtgtgccgtgtagatctgtgaccgccaaccacgtcctgcgtgtgtcaggctcaggccccgttctgcagaggagcccccagagcagggctggcactgtgccctggatgctgccccatccactccagtggagggtctgacaggctgtggctgagtggcacccctggcagcacagcgtccggcattgtggtcaggagtggccggctggcggcttgggatgagtgtcgggtgcacagggtggagggtgggtaaggggcactgagctggcctgatgggctggagcctcctagggcagttgggtggcctgatcctctcctgtcctgccccatgctgagggacactagggaacatttgggggtgtacttgaggggccattgctgtgcaagggactggggccagggatgctgagtgtctggcagttgttgggatgtttgtggatacaagtgagttgctttgcgccaaaggccagtggggccctgtggatacacacacttcatggttgggtgcttcctgctgctgtcctctccctggcagggcttctctcttctcttacccctgtgttagttcactctcacagtgctagtgaagacatacccgagactcggtgatttataaaggaaaaaggtttaattaactcacagtttatcatggctggggaggcctcaggaaaatgacaatcatagtggaaggggaagcaaacacgtccttctttacatggtggcaggaaggagaagtgccgagcaaaagggggaaaagtcccttataaaacagtcacctctctcgagagctcactatcacgtgagcagcagtatgggggtaactgcccctgtgattcactcacctcccatgacatgtgggcattatggaaactacagtttcagatgagatttgggtggggacacagtcagaccatatcatatcatgcctcctccttgtgaatgggcagctgcctgtctgtagagaccacgaccatgtgggtggcctctgtttgtgggtttctcccagcctctgtgccgtccgcaccagcagtgcttgtggagctggactgcctgttagtttgcacaggggttgacttggcttgggaaggtgcccttgggaatggggtgcagcttccctgcagagccttgctcctccctgacggtggcccccagggcccgctagactgttcaggaaggaggggcctggggaacgtggatgttgcaggagactcttagctgcttctggtctttcctgcccgctttggctgcctgcctggctgcctctgccaggcctatctctagaaaaggctgtgttcccagcgttagagcctggatccctctcctgctgcattgggagctccccaaggtcgggtttccttgtcttcgggtggtgcccagtgctgtgccatgctgggtgtttgctgtgggccttcacttgttcattgcaaatacttctttgtctccactgtcctctttaccaagggcacacttcaggatctcctgggactttgtgcagcaccgcccaggcctgcagaggcagggtgcagaccacctcgtacttggtgatgtgcctgcctccttggctaaggccctctcactaactctgggacatccagacgccttcctccccgttgggtctggtggcctgtcctgcttcttcctcaggcttcttctctggtttttctgctccagtccgatggacctgggccccctgcaacagtatgacacatggcctgttactgcttttccgctgaccgccacctcctgcagccctgtgtacacacaggagccccccccccccccaaccctctggcctgccacgtgtgggtacctgccttatccaggccctgcccacctggggtcttgctggggacacctcggtttccctgccctggcattcatcgtctgcgctggctctctgggggctccccagtcctccctggcaaggctcttgtctcttagaggacagaggctccttgtcgctcccgttcaggaagcgtttgttcaacacctgctgtgtgcagcccactttaggtgcttcaggaatatgagatgagtcaggcctgagtcttgttcgtcctcccggcacttggcacacacacagccgcctgccctccagctgcacccacgcactccgctccctgggcctggctctcgctcccttctgtgctgggaaggggcacaagaggatcctggagctggggccactgggagcagcagccaacacgtcagtgtggacagtgaggtcctgctcacgcccttcagctttttctgtggtcaccttggcccttatttagtgttgaggaaacagagggatattcgggttagggagtgtggttaagtggtgggcagtggggctgggccccattcccactgagccttatcccccctccaccgtctccggcagcgcagccgcattctgtgtttaggtggtggggtgctggcaggagagggtgtgggcctggggcaggaggaaggggaagtgggacagcccgccctgctctgagagcttcttcccgcagggcccgccaccgttcccctcctgatggcagcacctcagtgcgttccctctgctccgagcgctccatgcaggtcatgcgcggcaggtccttctgtttggccaggaatagtcctgaccttgggggcagggccgtggcttccctggatgtggccatgcgggaaccatgcagactgagtgtccacaggcccggcattgacacgccatgtggagcctctatccagcctcctgtgaccggggaacacgcggggaccctgtccagcgcctcctctgatcccggaacacacggggaccctgtccagcgcctcctctgaccccggaacatgcggggaccctgtccagcgcctcctctgaccccggaacacgtggggaccctgtccagcctcctctgaccccggaacacgcggggaccctgtccagcacctcctctgaccccagaacacgtggggaccctgtccaccgcctcctctgaccccggaacacgcggggaccctgtccagtgcctcctctgaccccggaacacgtggggaccctgtccagcctcctctgaccccggaacacgcggggaccctgtccagcgcctcctctgaccctggaacacgtggggaccctgtccagcgcctcctctgaccccggaacatgcgggaattgctgggaagggtcctgagccagcgccccgtggtgtgaacgtggcctcatgtcctcctgcgggagtgcttccgcagtgtgccagtggtgggccccggcttctgggggagccttgggtcgcggggcggggatacagactgagctggcgcctccagctgttcgggctctgatgcaggtctcccaggcgctctgctcttctctgctgcactggcccgtcactgtttctaccctgggaacagattcttccggaaggttccctgctgctgcagcggtgctcaccggaaggcggggcttcgaggcccttgtgtttgcaaagcagattcttaccgagatcccagaactacctgtgggcctcaaaagatgggtctgacaagtgtcttgtgtgaagggccagaacggactctttggggtttgccgggcaggtggtctctgtcgaagacgctgaactctgccatcgtgctgtgagagcggcagcggcgattcgtatttgattctgggtggctgtgctccatcaaaactttgttaaaaaaacaaaagttgtttacaaaaacaggctgtgggtgggatttggccacaggctgtagttgttggaccctgttaagaaaccaccgttcaagtcgtagccatgctcatcttcatgaagatccttctgccacgtgacgtcggcttgggccttgctgcagggaggtgacccgcaagattgatcccggcagccaggctttcatttctcgcaattgtctctttcaggaaagatgccctaggaccatacactttgtggccttaaggaggatggcgtcctctggtgttggccccggctgggcggtgctgcagggtgggagctgtgctctgtgtagggaaggccccctggttccctgctcagaccgtgggctggctcagggctctcccgcccgaggtgtgttgagatggcctttgggatgagtcattaccatccggccatttgcccttttgtctttctcatgtgtctggcatgttcttctgggaacttttcattttgacataatgttacactgacaggaaagttgcagaagtcgtggagaatgtttcgacgcaccctccgccagctttcccgagggtaacgtcttgtgagcccgtgtacagttatcagaagctgtaaggcctgggtgcagcaggcgcgggtcctgactgcgttcaggtcttgccggctctcccactgagctcctttttctgtgccaggatctggcctgggatccccatggcgtttggtggccctgtcctgccctgcactctgggacaggagagaatctgctcctcggtctctcctgtcgtcgtgaccccgcctcttcgagagcacgggctggtgttttgtggatgttcctcagttggagcgagtctgatgttatacatgattaggttgaagctatgcatttttggacagaaaatcttaaaagggatgtcatgtccctctgggtgtgtgatgtcggggtgtgcgacatcaccatgttctgttgcgggtgtggtcactccggtcacctggcgaaggcctccctaaatgcatggctgcggcttttgttctgataataagtatcttggggaagatgctttgagaatatgcaaatatcctatttattttattttatttttttgagatagagtctcgctctgttgcccaggctggagtgcagtggtgtaatcttggctcactgcaacctctgcttcccgaattcaagcaattctcctgcctcggcctcccaagtagctgggaccacaggcgcctgccaccacgcctggctaatttttgtatttttagtagagagggggtttcgccatgttagtcgggctggtcttgaactcctgacctcaggtgatccacccacctcagcctcccaaagcgctgggattacagctgtgagccaccgtgcccagcccccatttcttacaaaaacttctcctcctagttcaagcatctattggtgcatctcagctgcggggcttgtcaccatggccccagggcggttttctgtccgcccgtctcttccgtgtttcctgagtgggacgctttgctgagggaggctctgcccctcgtccccgtttcctgagtgggacgctttgctgagggaggctctgcccctcgtccccgtttcctgagtgggacgctttgctgagggaggctctgcccctcgtcgagtaggttatttgtgtcagttgcttccttctctgttttacttcacggccgtgacccagtgctctgcggattcggttcattcacggtatttcagccttggtcactgggagctctcacagttgggctctcgtgccctgtgatttgccctcatctttttttaaagccttttttttttttcaaactatctggcactgcaggatgctctaaacttagatgtttttcctgcccttttcctgcagtccgccactttcccagtgagccctgtttcctcttgttgccgagtgctgcttagagatgagatgtgggtgtggggtgctgcctgctccgggtgcgtcagggccccagggcccctcggtggacaccctgacactggctccatccagcacccctgggctgtcctcgcctcctgtgctgtctccttggtcttgagaagcccaggtgtcagcacacaccatgttttacttacccatccagtcctcacgtgcgcacagggtctttctggaattgctaatccatggctctgtgaggagaggttgacttgcgagggtgcagtgtctgtggacaggccgttctgtccttggcctaccgttcccagtggaagtggcgttttctcagcaccgtgggtgccgttgtgtttcccactgcctggtgttgtgttctttgtttgtggttcccttaggtttaccgcttagagctggtgtttcattttgagtctttttcattctggttgattaaaaaaaactgtctatacagcctcatttgcccttctgctgtgcagctgcgcattttcacatgcctggggctgacttgcggccccaccaccccagactcccctccctggccaccccagcatgctttctgtctggtgattttgccttttccagaacgtcatacaaatgtggcatctttggctcatggaggtgcatttgggactcaccgcgtggctgtgtgaatcgcagcgctgcttttcgttgctgagtgatgctccaggcacggctgctctgggacttgtttattcgttcactggttgaaggacatctgtattgtttctgggtttggtgaaatggagtaaagctgctggaaatgttggctttgtatgatctaaactcttacttttccttgagcacatacttaggagtgggactgctggatcctggcatccttttaacttcagaagacattgccttgtgggtctccacagcgggaagcatccggtgtgtgcgttcgcggtgtgtgcgtttgcggtgtgtgcaggtccactccgcacaggcctgctcctgctgggccacgccagggttttgggcttagctgcccccacagggctgtgtgggctgtgtgttgcgttttccagcgtgcggctgctggccccaacctggcgtcagacagttgctgtggtgctttctgcagcccccagccgtgttggcttgcacagccctctggacttgtggtcatcatggagttgtagccccttttccccacctgatttcccacgtatcgggatcaaatctaagctggtttcgttttgcttcctctcaagtcttttgtctttcctcccttcctcctttttcattgatctctgttctccggtgactttagggaaagactgtacctcattcattccgaggcacgctccttgactagagcagagagcaagggctgagcagccacggtctcgaaagctccttgccgcctgggaggcttccacgcctgggactgggggctgggcagccagcgtgcagaggtggaggggtgcatggaggcgcctgcgggctctgaggcctggcttcccgagcccctctagtcttcatctgtgggacgatcacacagaccgcatggtgtggggggagcgaggggcgggcacagtggacgctcggtgtgtgtgctcctcctctctccctgtttcttctttgttcctcttgtctttaatttacttttcgtcggaggacttggccgcagcgtgccctgtggacttgagaccgaagctctcttctgctctttgtaccctgctgcttcctgatccgttcttcctcccctcacttgtgtacaggactcgagggagggatggggtgagagcagagcaagccagggatgtagtgagctttgtttggacaggaagggtttgcccgcgccgtcatctcctcggctctgctgggaaactgtgtttgagggagatggtggggtctgagcgcagacggctgttgtcctgtgagatgcagaaagcgcttcttatgggcgtgcaccatggaattccctgctcggaccgcactgggggcaggcggtgagtatcggtatagaagtagcttttattaattggtgaagcccgtcacagatccgaaagcatcttaatagtctgaaatgatggctcttcagcaagaaaaatttgatttgggacaaaagggagacacttgagacccaaaatgacttggctgtgttgaggatgggaaggaggccttcatctgccgcacgtctgagtcactccagagttttctccactgccagtgtgagtcagagcgaatcactgttgggttgtgacttcagaagaagtgaactctgtctcaggctgtattaatagaagtagatgcttcacaggagaggaggtgtctgtgcgagtcacagccctgcggggtctgatttccgctttgggcgtggcttctgagccgggacctcgaggcgccaagggaacaggagcagccgggcagctgctcgcttggttgtgcctgctgtgtactgaggcgtggggcatggcggcacggctgtgagcgcacagtccagccacagaaggaggcttcaagaatctttgcggtgctgccatctggacatctgtgtcattgaagtcacaggaggaggcttcaagaatcttcgaggtgctgccatctggacatctgtgtcattttgataacgtgtgtgagatcagtggaggggagccttaggaaaatcggctgtggtttaataaactgaacttcccgctgctttgagccggagcctcctggactggaaaggcgtgggcctcatggccacctccggcctgcgcagctgggtctgcactctcacaactgtgctgagcccacgcttgtgcccttactagtggcctgacctctgcgctgtggagaagggtggatattgtcgccaactctcagacttcttgtgtgtgttcagaaagtacccaaacggattcaaaggaataattagcgtatcctgtaagatatgaatcttaattcctaaattacatatttagcagattgtccaaaatagcacttgtaatggcaacattcaattagtttaaaaaatgtatattattgcaacactcgccatgagttttatttagaggtttctaaatataatgctataaaaacacagaagtgtttaaaactatttagacccacgcagccgcagtgagctcttgctaaacttcctacgttaaccagctcttgacaatcttggattgtggggaagtcttctgatgtagtccctaaagctgacacgccagagcatctcgaggctgttgggggctgttgctgggatcctgaggccgcacacctccctgctatgagttctgacgtttacaaacataggaagtgagttgaaatgacagagtccttggggccccactcttgagtgtcctcctggggttggcgggcgtggggctcccgctgtgccgggttcggctcctgtgttgccgtgttccctgcggctgctgcagccgcttctcgtcacctgattgtgtgtgcgcctccagtgctctcatgggctgcttaaggcagggactatccatgtggcctgaagaagaagccgaggcccggggaagttgcatgtaattgacaccagagggctggcctcatttcaggaggagcagagctcgggttttccgtctaggtgggagatgggatggtgatgggcccacaggcagggcctgtcctctgatgggaatccgaagtgggtgcggaggacccagagctgagggtgagcagctctgagctgcagagcgggtgcggggaggctgtgtgcgcagcacagggaggcgtctggaatggccgggtgggggtctggaacccatacttggtagcgcctgtttggtctgtcccgtgctcttcctgcgagccctcgcgggggccctgcacttccccaggagctgcctcagagatgtgccagtgaagaagggatggaactgatcgtggatcgggccggctcctggaggccacctgggcccatttctgacagccgctcctgccgcgtccctagctcagaaggagctcgaggctgagccgtttccccagggctgctgcctttgtttctcccattctgaaaggagatgaaagtttctactgaccttagagagaaagccagagtgaaaccccctctgccaacccctggctccctgtgaaaagccttcctggtaatcaagtgtttacagaggaaggctttgttcagaccctttctggggctctgtatgtttaaacaaagagctttttagacctaaacacagatgttcatttgaaaatgaaaaatcaaattaagcagaaccagcctttgaaagttaatgccctatagcaagtaaaacaaagggagaaaaacactgtgttgtaaattttacttaaataactttttattttaaataaagttttaaactaaaaaagtataatttgaaagccactcatcttcctctctgtcctccagtagaacatctgtgctgattctgacgcggatgaatgacatgaattaaaccaaaaccgtcggagcgctctttttaccataattacaccttgttcgtttgtgagacacaatgtggggatgaaatgccaattaagcctgctatgataatgaggtggggcctgaatagtgatcagcggacatgaatcccaccggaattcatttgctacagcccccaagtttgttctcttctgatgggaatgttatcgtacataatgaaaatctttagtgctccttgtatttaaaaatgatccattttggggtttttggtcagcaagttttaaaacaggtgttttccgagcacctggatgggtttcatgtccccactgagcatcctgttggtggggggtgggggggtgccggtgtctcctgccccctgcctggactcttctgtggagagctatggtgtcacagcccgggacacagtccagcgacatgtgccaggcaccatccccatgggtgcccttgcaggtctgggtggcagctgagaaaccattttcacccatcactgtgtccaagcatttaccatctccgaccctcaaataccctctaatgttttgaaacataggaagtgcgttgaaattattgaaagcactgtgaaggaaatgctttgggtgttgtggaatgacagggtgggaaagacgtcactgggggccaggcagggcctcaccaggaggcagcatctgagcagaggcctgagggcagccgggggctgggcaggggtgaccaagcgggacagacgagctgctgggacgccagcagggctggcacagtgcggggatcacagcatgattgcagcgggcagctgttgaagactggaagcgcggcagtggcatggttacctcacacagtcggaagagcgacctggagaaagaggccttcgggatggggagcaggaagtgtgtcggtgcgtgaggatgcaggggtccagcgaggaggctgtgggtagttcagggggaggtggtggggtggcaaagaccaccctgcagtgaccacataatcctcgagggccagccccctctgccccagggctgctgtggcttgggctgcagcctctggactgggcttcctgccaccggatgctccggcagcgagacctcaccaactctgactgtcccgccccacacactcctggcttaccgcctgcagggaaggtgcttgcgactcctctgtgttgctagggatgttggccctgcctccttccacgcctcccggtgcgctgccatcctcaggccctccggctgtcccaggcagccaggtgctgagtgatgctgtatgtgggtgcccttcctgtccttgggagccaggctgtggggccgggccctgtgagaacacacggcgtcaggagcctcctggctctttcacactagactacgctcctctaggggactgggccagctgcgttctggacccccgggcccctgcccaggtctgcactcagctgtctctcagccagggccaggagggtctccatcacgagtcctcctgggggctgaagggtgactggctcccagctgagagagccggctgcagcatggactcatgacagctggggaggggcagccctgcagaagggactgaatggtgactttcctctctcaggtttcgtggaggccctacagcccatgcgggacaacacgttccagtgcagctgcaggcgtcttttgcgggatgggccgagagtgtgacgggctatgctagcctgggtctggtgggctggagaggagggaggcggtctcctaggagggatttgtgcccctggcctgccttctccccccacccctgggagagtggagctcacgtgtcctccttggtgttaggcagggttggagagggagcctcggagagcctgctggcttggcacaggtttccaggagcgcatgtgggaagggcagggtggggccgggcctgggaaagggggagagtgagtgaccatggccgtctccagggatgggcatgtatatccgatagagaaggaagggcagggtggggccgggcctgggaagtggggagtgtgagtgaccatggccgtctccagggatggacatgtggatccgatagagaagcggcctgccgtgctcgcacctttcacgcaaggcaccgacgcagtggaggggtgctgccgatgtgccagcactaagggcccaattcctagcctaggcgtaatggggcaagggccctgtgctgggggtgggaggcgggactgtgtgctgggcagggtggaggggcggggctgtgtgatggctggcgctgtgtgtgatagataggtctggggggtggggcttcgtgctgggcagaatggaggggcggggccatgtgtggggcaggggcggggccatatgtggggcaggggcaggggcagggctgaggtgttggtgccctttggttgtggggccgcagctggatagggctctgggactgtgctccagaaggtgttgctaggtggcatctgtgacgatgggggcctttcctgctgccctaccctggagctggggagcggggtgggtgaggagcgttgaggaggagagagctggagctggtggtactggggttttggctgggcgtctcacgtgcctggactttctggtctcatctggaaggtggtctcttactggaccgtgcgggggtgaggagacaggccgaggccaccaggtaaagcagggctgtggtgagagaggccccattttccctcagaaccttcacagtgcgtggctggccttggcaaggctgcatggctggtcccagggcttcctggcctcgttacttcctggcttcagggcagtgtaggagcagccacaaagcagacatttgggttgtcctttatgaatgcctcgggtgatgatccacgctccctgccttgccccagcgcaggctgtgcccgcccaccctcccgtggagcccacgctttgctctgcctgctgctgccaggccagcagagaccgccccgtagggcactgcggtttctgcggcctgttctgccctgagtggccttcctcccctgctcttagctgggccccctcactccacctcgctgctggctttgttgcctttcaggctgtgaccacctgaagccagctcgtgtgttagtgccctttgttagtaaccaaccccttgtcggcagagaccttccctttctgctcactggaatatccccaagcaggacggtgcggtgtttgtggcctcagagagtgaggctctcccgggctgcagaggcacagccagtttcttcccggcagacctcttttcagaacagcccctcactgcggtgtccggcccctggggaagccgggctctgactgggtgggtcagccctcaggctgtgccaggaatcccatctccaggcgggctgtgcgtagttcccttcgtgttttaacatttaggaggtgagcggtttccttccctgagctccggaaagagtccccagggcttgcggggggacctaccctgcattgcacgttggaaggagaggcagctgcaggctgagcccacatggctgtgcacggcctggcgtgggagctgcagtgatttatgtgacctgtgctcagataattaaagtgggatttggcagtgaggtctttcatggcaaaggcgttagggatgtcacaatgaggcatgtaagtataaaacagttatgttttcaggttaagaatttaacgaggagtaaattcatttaaaccgaagagctggcttaaggggagctttcgtggaagatctgtagttgctggcatttcattccttctcatttgagcccagcctgtctctggtggcagagcgcgtgttccgagtgtccaggtgccgcagccgccccctgtaggcaccagcgtgtttgacatgcgggtcagggatctgacgcaacaggccgcctccacatgccagactgcgtcccccttggcctgctattgcgccgccgtgacggctctccttcgcggaggggcggggctgtgggggctgtcttcctgtgttttctctccggggcctcatctgccttcaggagcctgtgcagtgccactcgggctgagcagcctccgccagtgcacaggggactccgggcttgcctctgtggaggagtttgccgctatctgctctgcctttgtcctggttccccaaatggaggcccagcctgccgtggttctaatccaggtttctggtcatcaaagcagcatgcctttaataacagatatggcctgttgtgcagttggcccggagagctctgatcattacttatctgccacgagatgcttttgctcaaggcaggctgctgaggagcacactccttaccttcattgaatgatttccagacaccggctgcatatttgattctctgccatgtgtctgggggcctctttctccgacgtccagcggggtggagtgttgtatggcgtggcatcagaactggtggtctccccgcattccttgccttttcccaccccatctccagagtccggacaccacctgtgagactgtccctctgcctggggatgcggagggactccgtgcacagtggttcagggggtctgcttatgccacactgctgggatctgggcagggaggaggacagcacctgccctctgagtagccgcctccctggctcctcctcgtggccgctccctccttctcccctgtgggatcgagtctcagtgttctggctgtgctgcccggctcctgagaggccttcgcaggggctcccagggctgcctggtggtgggctttgccccagtgctggcccatctgcggttgccccgcccaacaaagagcacggtggtcgagagccccgccgctgtgcagtggcctcgggggcgggtgagatctgctgcactgctgtatcgcctcaccctctgtcctctcaggtgctcacccacttcttccaaacagaaacgtcatcactaggcatggcgatgtcccatgtgccgtctactgagcggcggggcaggcaggcccaggccttcactgagtgcaggagcgcaggtatgactgtgtgtgcagggcccgtcggggcagccatggcttgggctgcgacccggccctcagcgtggccggatggacggcctccctctggacacaccatgtgggctgagagctgaagcgtggtcggagctgcccctttgtagggtgcaggggcaggggagagagcccgttccaggcagaggcagcagcaagcgcaggggccctgaggtgggagaggacgcgcgtctccagcaggcaggcagcgtggccaggcctgacccagcgctgacccaggtgttggcagcatcacggaggctgcctcctctgagttgtggagctgatgtcctgagaggggacagtgccacctctgccgaacctgttttctccgtgtgccttatacacctgaggagaggcccgctttaggagtgggtaggagaagacgccatctctgggcattgtctctggagtgacaaggatgcgtctcatgctgaggatggcgtggagagtggtcctgagagtgctggtgacggtggagacggtgacggccatgatggtgcgagggtggcggtgaccgtggtgtcactgatggtgacagtggtgatggtggggacgtggtgagagtgctggtgacggtggtgatggtgtggagagtggtcctgagagtgctggtgacagtggagatagtgacagtggcgatgatggtgcgagggtggtggagaccgtggtgtcaccgatggtgacagtggtgatggggatgtggtgagagtgatggtgacagttgtgatggtgacggtggtggtgatggtgacgtgagaatggtggtgatggtggttattggtgacagtggtgagtggtgacagtagcagtggtggtgagtggtgacagtagcagtggtggtgagggtgacagtggtgatggtgacatggtgagagtgctagtgatggtggtggtgatggtgacggtggtgatagtgacggtggtgatggtggcggtggtgatggtgatggtgacggcggtgatggtgacggtggtgatggtgacagtggcggtggtggtggtgatagtgatggtggtgatggtgacagtggcggtggtggtggtggcggtggcgacggtggcggtggtgacggtgacggtgatggtggttgtggtgacagtggcagtgttggtgatgatggtgggtgcagtggcaggacttggcatctgttgagagtctgccctgtgactggtgccaggacctagcctgcgttttcaccttatcctgtgctctcagcctcttctgctggggagactcagtcctgagtcagacaggagggtccaaggtcagcgaggctgtgtgatctgcccactcccacccatggcagattcagacctccagtcagggtcttcccagctgcagagccccctgtgtgcactggactgcactcctccttctcctgcctggtatgtgtttatccagcatgtgtcaggcgtgggccagcttgggctgtgatggtgactgagacagctgtggccctgtgtgcacggagccaacagtctagtgggtgagcagcatagaagctgttcactttggtgagcatggagccggtagtctggtgggtggcagcatagaggctgctcactttggtaagttgagggaagaagcgtctttgttctttactggctctcagggtccaggtgcacagcctcctggatggaggccctttaggaatggagccccagtctcacgccaggcacccggatggagaccctttaggagtggagccccagtctcctgccacccacctggatggagaccctttaggagtggagccccagtctcatgccacccacctggatggagaccctttaggagtggagccccagtctcatgccacccacctggatggagaccctttaggagtggagccccagtctcatgccacccacctggatggagaccctttaggagtggagccccagtctcatgccacccacctggatggagaccctttaggagtggagccccagtctcatgccacccacctgaatggagaccctttaggagtggagccccagtctcgcgccaggcacagtggctgtggcccttccccccagggcagaccccatagcacaaaagcccgcatcctctttggtgtatgaatgttcccacagtggaaactagggtttttccagtcccttgtgacaaaggattatgagttttttcccattgaaggggagcaagtttctgagggtgggaaggaagccgttgaaaacaaattggcagcactccccccatcctcttgctgatggggaaagtggttaattaggtgatttttctcttcccctgacacgtgcaaatgaggcttcgttaataactgcactgttacagaaatgatacgactttaacaccaacgtcaagttgtcaggcgtgtctgcagagtggaggtggggggcactggaggcccctgcgcccctcccgacaggagtcatgctggagccgcgcctccagtcgctggggcttggccttgggcaacgagctgttcccctcccaccctccaacccccttcagggccagcttaattatttaaaactgatgataaaaacagaatgagctgccaagatgaagtgatgatttgcggccaggacctggggcttgggtggacgcggctcccactctccctgcttgctgtgtgctggcccagtgcggccgtttccaaggacgccttccggtttgcagccagggcccaggacacggacagcatctctgctctcaggtgtcaggaggcctgcagatggtgcagggcccgctcagggcttgtcctgccaggacgaggcagacgcgccgggtgggcaggtgggtagggtaaagcagaagcaaagcggcagtaccacagagcaaggcaccagcattgtaatgtctggagtgtggcaccccctccaggaagcaggtgcttcacgctcagaagcgcctggctgtggcatgcttcttactatctgtcagaaggctcaaggtcaaaaggccgtgctttctgccatagagtttcaagagtaaaggagaacgcggagatctagtcagctgggattcctagctctgctcagaaacaggctgggctttgagaccttttcctcctcattttccctgctggtctggaacagaaagtacttgcagctgactgcgctggccgtcgtaaagcagtgtgcacctgtctctcaaacctcaatggttgcctgggatttgcttctcacctatgtccttatccatcaacaggtagttattaaatgcccatgtccctgagacggttttgggctttgtgtggctgggggcgaagtgtaaggaatgacctctacctgtaaggagctcacagccagccccttggcttgagctgtgagaagtttgaaaatccatgtgctaggttagcccagatgacaccaagagcattggtgctggttcttctgagtcatgcctggggcatcgagggctgggctggtgggaggtgactcctcacagtcggcagccagtcccactggggatagtttcatggccagaatggcctaccaggggctcctccctgcagggttgagagctcacgcctgaggactgttcacaggaagccacggcccgggtgcttcctgggtctcgggtaggagtacctcttctgaaccacgtctaatgggttttttgaagagaagagaaatgaatctcccagtgctgacttctgagattcggctgtctcccagcccgatgcgctcacttccgtccacgctcccgcctggcctctgggtggcgggttgttagtacagtaaagattgctagctgtctcttttgcaaatctaaaatgagatttcatttttttaaataaaaagaaaaaagtgcttgaacatttgcagctgggagatagcacagattagaaacattacttatctctgctgcacaaaagaaggcagcgagagaggaataaattgctgttgaatgctaacgaagccaaggcggcaggggctgcgggaaacaactcctgttgaggaacagagcgagcacctgacctgcaccctccacagtgggccgggcgccggagtgcacagggcaggcggggctgtgggtccaggtgagacaggctgtggctgctgcatgttgacctggcggtcggggtggagtctggtcaccagtgttagcggtgcgttgggggatgctccttcctggaccatgggaggctgtgctaccactgcgcttaggagcctcagtgaagctcaccctcttcagccacgtgcactggggtcacttgtgtttctgtcacccttgccacccatcgtgtcaggaggcctccgtgtccatgccagggtgccctccatccccagacattccggcaccttcctgttgtttcctctataagaattcccacctgccctcttggcttagcaaattccagctcagcctttgaggtccagttcgagtagcgtcttttctgacccctttatttggccctccaggggctttccttctgttcctccatttccccttgggcccacctctggggacgccgggccttggtgcgtgatgcctggcgtgtggtgtgagccctgtggtgtgtagatcttcattgcctctggctcatgccgggcagctatcgggtgtggtagtgcgctcccttgggcctcctggagcagtggcagcaggcggctcttgcatgtgccgtgtcctccgtgaccagggctgtgctggatggacgtgtctgccgtgctgtgctccctgcccatttgtttgagggggccgtccttagcgtagccttcctgacttgttaaccaggcaagagaccatacacatgatggcttgggtgactgctgctgcgtacggcatggttggtgggaccccaggcagcaggggagagggaccctggctatttggatctctgcggtgagtgggagggactcttgcccactttgtgtctggttgtcacagggtttagggcccgaggtctcttgttcctgtctggactgagcacctgggtccccgtggcgtgtgctgcgcaggcctcatctgtggacggagggtgtttgccatgcgccttctgcgcagaggcctggtgtgtgactggcgctctggtgctacggggctttggcagaggacggcgctgtgcagtcagccccagtcctggggcctcaaagactcaaggtcattttgagtcctccaaagcaaggtgattccaagtgtgtcttcagagtctgaagtcgcgggcgtcctcactgatctgtcctctgtgccccgagaagacagagctgtgtggcatggagccgccgcatgagtgattccgctgccttcctcccgctggaggtgaagcttcctctcagttccgtcttactttgatccagtgcgacaccgcgctgctgagcgtgccctccccgttggtctgggagacctgagtgcagaagcctacagcaggggcaccccttctgctttcccggccctcgtcccttgctgaggaacactgcccaggcatgagcctcagaatgggctgagtctcgatgcaggcgctgctcccaggggtcccagacgcctctgcagcctcaaggcctcactgtctcccttccccactcagcaccactccctgctggtccgggcagcccctgctgctgctgtgtgtctcttgcctcatcccctgtgccaggggcgtgcccttctgcacctccagaggcctggtgcccgtggatggccggctgtggctgtgggtgtccgcacctcctgctgcctgggttctcaccctcatagcttctctaggtgtgagaagcactttctcattcactgcctggctcccagcttgggttccttggcattctcggacccattgttcctcggccccattgctttctcagtggtgtggactgagatgaattggagcagtcgcctgtctgaggcctgggcggagtgagaccccctccccaggtgtcccggctctggcccccacgtcctcgctgcctgcattgtgctgctttggattttgggctggttttgagtcctgtccacttggtcttggctgaggaggccttagcggtcatctcctcttgtgtgtcccggaaacaaggaagttgaggcctgagtggggtgagcgcgtgcttgggtgccgtggggtggggtgtggcagagccaagaggggtgagcgcgtgcctgggcgccgtggggtggggcgtggtggagccgagtagggtgagcctgtgcctgggtgccatggggtgtggtggagccaggagcctggaggctgcccccttcccctttcacatctcccgccttgcagctggtgtgggggatacccgtggtgcgtttatcataaccatgtcaactgtggtccactgcttgctttctgtgcctggcagggtccccgggtgcgctgtcattcctggcagtcctggagggtgcccgcctgtgggtggcagcctggaggtacagtggcagacctgctggccgggggtcaccggctatgagggtggggcccacgcctgggccagcgtcctctgctgtcgggctgtaccatgggtctgtgcccccagcctctgctgggcggggtggtggtggtcgtggggcagctgcagcctgccccctcccttatgtctgtggctgggcctcgtgaaggggcctgagttgacgagtttgcctgagacacatgcaggaaggttctctgaggctgagtctggcctcgttcctcctgtcctctgccgaggagctgtagggtctcgctgtagcgggggaagctgtcctcgaagtcttcaattcagatgccccttggagagctgtttcagtgcccgccccgccctgcccaatgcacacacagaataaaatagaagagtcccctggtcccatgaaggcagctaacaaattcaaagctctgtggaaaagcagcgtaggaggagacctggcttttgagagtgaaagccgagtccgcactgaggttcggccaggctcatgtgtgcccagagccagattgcaggcatgagccccgccacccccagatgtgtgcaggcgcagagggtcagcaccacagctctttgcgccggaggactgggtctttgtgtgagttctccctgggatcacagggccctttcctcctgggagcccttgtgtccgacgaggacgaccttgtggctggcaagtgtcctggaggctggtccctcaggaccctccctgtcctcatctggaattcacctttcttctgagcacagcctgtgtggcgtcgtgtgctctgatggccttacccagaggccaccttggccgccggccttgctttctcctgtttgtgggctgcgagctgtcattacgtgactgagtcctgatcaggcctgggggagcccgattctaacgaccctgaggctcatgagggaccccgtctctcctgctgtgtctccccgcggacccgcgctctccttccttcacagaagcaaagctcccttgagggagacacctcgcctctctccttcaggcacccccacccaccctagggctgccggcaagtgtgcgtggatgcactctgcccttccccttagagacggctggggtgtccggcctgcacccacagctgtccctattgtccttgccctcctctcctcacggcttccctgcgttggccccgccggctgagccttgtgcgcctgtgtgtccctgtgcccctctcgcagtaggcaggtgatgacagcggctcagggaggaagtgctgcctcgccccaccctgcccagcattgctgctgtccacctcgcctccttgcgttttctgtttagcaacagccacagcacgcactatctcccctctggttacgctgcccttctctttaacagcgaccgcggcttcagcactgcccatctccgtttgcagcctgggagccgcgctaacccactcaggctgctttgcatctcttctgctatttgaagttaagggtgtgtggataaagggatgtgtgcttggctttttcttttcttttctttttttatctttccaaaaacattttattttaaaatatttcttgcaggctgggcgccgtggctcatgcctgtaatcccagcactttgggaggccgaggcgggtggatcacgaggtcaagagatcgagaccatcccggctaacatggtgaaaccccggctctactaaaaatacaaaaaaatgtagccaggcgtggtggcgggtgcctgtagtcccagctacttgggaggctgaggcaggagaatggcgtgaaccccggaggcggagcttgtagtgagctgagatggagccactgcactccagcctaggcgacagagcgagactctgcctcaaaaaaaaatatggggagatatatatatatatatttactatttaatgattgctcagtttgaaaaacttcattttgctcatgtttcactgtagtgtatgtagtgtgtatatagagagctgcacaaattatccatgaacacggcatcaccatcacccggtcaggaaacagcgtgatcagctgagtccctcctgcccccccacttcctgttcctggaactcccacccagttcccatcgccctgggtcacttttgccgtgtttggtctctatgtagatgggtcatgtggtttcgttggttggagtccttcccccttgctgctttgcacctgcgagctgtgctcctgccccggggcctttgcacctgccatccacgctcctgtcccggggccttctcacctgccagccccgctcctgccccagggcctttgcactggccagtcctctttctggagcaccctgtctggatagcagcagccttcctgactttccttcctgtctttcacaactgttacctcctcgtgggccttccctgcccacctgtgaaacatcatgactgtctgttccctgtcttgctgtcactttttcccgtcaagcacattatagactttggttttttgtgtcttatttctcatccgtcttgtcacttgaagggtagcgcctcctcagcagtgttgtgaacaggttccaacacacaggggtgctcgggcatcctctgtcgagagtgtgggtgagtgcgtgtcccgttcccgatgtgagagctgtggattctgcatccagagggattctgcatccagagggagtgctggccactgggagccctttagggacacactcctccacactgaccatgggtgggtccctgctcagcctcctgggagggctgccccttgtggctggcgttgaggccacctgttcccagcagctcagcaagggctgtgagtttgctcatggctgggcgtgtgctcccagcgggctccccactcaccagtgctgtcctccctggcctctgctttccttggccctgcaagctgcacagacgaccgtctgcgcccgcgtggcctgagagctctgtgtggatgctgtggctctgaggttcctgtcctctccctgccttgctgtcatgagttcgggagcagcttctgggggttccgactgccgacctgacatcgtcacctgaggcttttcagctgatggagcctctccttgtctgttgccccgtgccccacagtggctttgtctgcgttcctgggttccgcgttccgtgctcctctggctgatggagcgcagctgtggactctcccgtgcgttgcccagccagtgccagtgtgtctcataggggtggatgagacggagctgtcttgggggccacttcctcttctaggttcgccggatctgctttccccacattctgtgagctgtgttcccacacctggaaggaaggaggaggagagcgaaggggatgtcagcattttatttgaattcctttctgagtctgattacaaaagcaacacactttgattcagaacactcgagaatgtggaggagacagcaaagctgagaagaaaggtttcccgtcgtccctcttcccagggaaagctgctgtgactgttttggccaggatccttcctggcatttttatatacatggaacatgtttttctaatgggattttaggagaaaatactgcatgcactatttactgagtcatcttgttttgtttaatcttttgtgaacattttccatgttaaatattcttttaaaacataactttttggctatgtactgccctccctctgaattttttttttttttttttttttgacacggagtctctctgtgtcccccaggctggagtgcagtggtgctatcttggctcactgcaacttctgcctcctgggtttaagcgattcttccgcctcagtctcccgagtagctggggttacaggtttgtgccaccatccccagctaatttttgtatatatttttttttttgtagagacggggtttcaccatattggccaggctggtcttgaactcctgacctcgtgatccacccgcctcagcctcccaaagtactgggattacaggtgtgagccactgcactcggcccaaatgcttttatatgcattacctggttacccatgaagaaggccctctgatctgctagaggaagatagaggagcaaatctgtgtgccctggggttggacgatgagtttttaggtataacactgaaaggaaatccataagagaaaaaatttgataaatttgccttgttaaagactcttgctctgtggaagatactgttaagaggacgaaaagacaaaccacagaatgggagaaaatatttacaagtcagatatttgacaaataactggtatccagaatatataaggccttcttaaaactcaataataggaaaacaggcaacctaattgaaagatgggcaaaatgtctgaaaagacagtcactgatatccagagggcaggtgtgtgaggggaggatgctcgggcggggcatggttgaaaacacagtcaccgatatccagagggcaggtgtgtgagggaggatgcttaggcggggcgtggttgaaaagacagtcaaccgatatccagagggcagatgcgtgagggaggatgcttgggtggggcgtggtcatgcacacctgtgatcctagcattttaggaggctgaggtgggaggattgcttgaacctgggaatttgaggctgcagtgagctgtgatcacaccactgcactccagcctgggagacagagagagaccctgtctcagaaattaaaaaataaaaagaggatgctcaggagtatttgtctttgggggattgcaaattagtacaaccatgagacatggccacacactgtgggaatggctaaaaactgtaagatcactgacggcactaaatgctggtggagacgtggagccacaggaactctcacgcactgctgggaggagtgcaaaatggtgccaccactttgaggcagcgtggcagctttttacaaagccaaacacggtcttatcgtatgacctgatggccctgtctgtgggctcttaaccacgggaattgaaaattgtgtccacacagagacctgaatgtgcgtgtttatagcaggtttattcatagttaactaaaaaccagaagcaccacaacaccctgtaacagaggaacagataaacaaattagtacatttgtgcaatggaatcctgttcagtgagagaatgggacaaggtatcgatcatacaacaacatagatgaatctttttttttttttttgagatggagtctcgctctgtcgcccaggctgtagtgcagtggcgtgatctctgctcactgcaagctccgcctcctgggttcacgccattcttctgcctcagcctccagagtagctgggactacaggcgcccaccactaagcccggctaattttttgtattttttggtagagacggggtttcaccctgttagccagtatggtctcgatctcctgaccttgtgatccgcccacctcggcctcccaaagtgctgggatcataggcgtgagctaccgtgtccggccagatggatcttgaatgtatttttctaagtgagaaaagccagaccccagccagacatcagcatgaactcctgactggctcaacacaagtagacagattcagaaggaactgcaggcagatgcgtctgtgtatgcagggctggcacatacctgtactgctgcggggcccggaggcaggcacacccagcaacagggagctgaccggggcccagagcagggcttccaagcactgttctcggtaggaggacctgggcgtctttggaaagatacctggttttaggactggggtaggaaatacacaggaggagcctggagtgtcttctagttccagaaagtaaggaaatgcagaaaacccaaaaggatggggcgtgtggatgggacacaggagccagaggaaagcattcctgtggctgaaggcgaaacacttgcagcaagaaaatgaagtggagtgacttataacccgacgcgtcaaataaacgcgggtgaatcaggctgaccgaaataaatgatggcgtgactcaatggggcagatgcagctcctccctccggaaggattgcagataaaatggatgtagttctctgccctcaagagatggaacttaatccccctagggtaggccaggctccgtgacctccttccaaagagtggagtacccaaaaggtaacgttgcctgcctggaggggcctggtgggcagcaccttcccggagcgatgagggccccgcccgggctccaagggatgatggggacgctgcgtctgtggttctttacagacctgtagctccagtccagcctcaacacacacctgaccctgcggggggcctgcctgggccagtcctgctcagaactgccaagtccatgagaaacaaggaaaggctgacaaatgagaggagactcaggaggtgtggcaactaatggcaccctgatccaaccctgggaaggaacaaggacgctgaaggacagacacactggtgctgtccaggcagagtcccaggtccgttcgtgacaccgttccagtgcttgcactgggaggctgggttcctgggaactcactgtactgtcctgacaacttttctgtacacctagtcgttccaaaatcaaaatcaaaatttactttaaaaacccctgaggtaaggatcattgggaggttttgaagtgttcaggacgcttgcctgagttccccaaagcaagcgaccgcagaaccagattcaactggcagtggacctggcccctccccgagcgccggtgactcagtggacctgctttgtcttctggcctacccttctctcacctccaccttagaaccccaggggtggtgcctgctcggcactagcctttgaggccccttaccgaccatttggatgtgtttggtgaggagtccctggcggtgaatgacttcttcctaatgaagttaaacacgaccatgccattcctgacaagggaacctgccgtttcctgtcactcttccttgtccgcctgccctcaaagctttcgttgcatagctggtagcaaaccaacatcactagggttggtgttccctgtccctggccggagctccttctgcagctcgaaaggtctggggagagcagcccttcagcccactctgatctcatggcaggtgtgtgttagcctggccttaattaagcctggccttcgagatggatgtcagaacagcatgattattggacactttgttttggaagcccgttcctttagaaggtgtgcacttggaagtgtgattaaacacgatgcacgtgatggggtgggccccggggacaggtgttggaagtgtgattaaacacgatgcacgtgatggggtgggcgtgtggggtgggccccggggacaggtattggaagtgtgattaaacacgatgcacgtgatgggtgggcgtgtgcggtgggccccagggacaggtgttggggcttggttgctttccctgtgtattagtctgttttcatgctgctgatacatacctgaaactggaaatacaaaaaggtttaattggacttatggttccacatggctgtggagggctccgaatcatggtgggaggcaaaaggctcttcttacatggtggtagcaagagaaaatgaggaagaagcaaaagtggaaagcctggataaacccatccgatctcgtgagtcttattcactatcacgagaatagcatgggaaagacgggcccccatgattcagttacctccccctgggtccctcccacagcctgtgggaattctgggagatgcaattccagttaggatttccacggggacgcagccaaaccatatcaccttggctgtggcctccactgtgcctgggactggccacagagagctgtgtctccgtggctgccttctccttgcctgtttgcgtggtctcgaggaagctgcacagcagggcccgagtcggccgtgtgagccgctctccctgtcaaagcacacccatccctgcctgctttgacctgaacttggtgaccttcaggccatcagtggagtggggcagaatgaatagcctgtcctggctcatggcagccaccgggtgaggcgcctgcatgcgtggctcggaggccttctgcaggcacaacccccaccgtgggcctggcagcttgtgtgggaggcgtgcgggtcggtggcagagggtgagcaccagccctgtgtgaaccttcacaactcctctgtggaccctggacttggcttcactgctggtgagaatctggtgtgtgctttggggcacccaggaaatggagttgagggcgtctaggttgtacttgagagatggcccggctccgtcggtgtccttccttcaggctgaagagctgcatggagtgtgacagatggcactccctccacccgtccccttgctgcctctcgctcatggccactgctgagtgctgggagtgccccaggctgtgccacaccgtcctgatctccccggcctcccagggagatggatgtgcacgtgcagtggcagctccagagctgtcatggtggcactcgaggctggggcggtgttccctggaggcaagcggggagcctctctggggttcagtggagctcagactgccatggtgggacggagcggggcgggggctgtggtgggaataggtggctcagtgtgggccagaaggttggagggctggcgccgacacggaaccagggtagcacgagaccaccgtgctggtaaccagatggcgcagcctgtgatgggggcctggattgtgttccagcggcaacaggcccgtcggcaggtttcaggcaggggtgtgaggaggcgtgaagaggcgcgatgtgtgatccaaggtcgctttgctgcccgacctcgtccactgttctgtggccatgcacgtgggcccccatatttccactcagcctgtgcgggtgctttgtgtgtagacttttaaaggggagaagtcagtgtggtccgagtcccagtcttcttcttctctaactctcctagagcctcaagcctcgatctgctgggaaacggatccagttagctgtgagaggggaagtggcagctttgctgagtttcactggatcttctcagaggcaccggctgttgaattctgtttcctctccccacacgctgttgtggttttcccttcagctgctagcgccctgctgtcttggatgctaaggggcgcctacggtgttccatgaagctgttctctgtggacaggcaggatctctctaaacatacagttggcgctagctttctttcagctccccagtccctgctcctggccatgggacatcattccttttacaacaaagaggatcctgtctcttcccaagtaccactgttcctttgcgatcggcacaggcaggagaggtccgccctgccaggcctgggtcagtggagctgtgcagactgtggtatagaagctgccttcaacagttgtattccatttgggcttctccatttcctgattagtagtagtattaataatattattttcaagacggagtctcacactgttgcccaggctggagtgcagtggtgcgatctcggctcactgcaacctccatttcccgggttcaagtgattatcgtgcctcagcctcatgagtagctgagattacaggcgcgcgccaccaggcctggctaatttttgtattcttagtagagacagggtttcgccatgttggtcaggctggtcttgaactcctgacctcaagtgatctgtccgcctcaccctcccgaagtgctggagttacaggcatgaaccaccatgcctggtccatttcccgattatttattggtagtaaaattcactttgaggtgtgtggctctgtgggtcttgacagttgcactgagcatcccccaccacagccatgattcagttccatcaccctaagagtttctcctgcctccccttggtcacagcgctcttcccctgccgccagcagccatgtgggtacgtttttaaagagaagagcttccatgaggtttgaagcccagtttctccatgcatgaccaccacctcctccatgctcttctcaaagtgatgttgctttttcttgttttaaaactttttcctgaactcagcttgtaactcttaggattcctggccacatctcccgtcttcctgcacgtgatttctctgccacccttgcttttagtcgcagaagataacagcaattgtgctgggcgcggtggctcatgcctgtaatcccagcaatttgggaggccgaggcaggtggatcaactgaggtcaagagttcgagaccagcctggccaacacagtgaaaccctgtctctactgaaaatacaaaaaaaattagctgggtgtggtggcaggcaactgtaatcccagctactctggaggctgaggcagaattgcttgaacctgggaggcggaggttgcagtgagccgagagcgtgccattgcactccagctctgggggacaagaacgagactttgtctccaaaaagaaaaaaaaagaaaaagagcaattgtggctggcctgtctccctgcctgcagcgtttacggctttcccatgggcagaggccgtgtgtggctccgtccccagccggctgtgctgtctctgtcgtgctccttggcactgactgactgacctgtctggagcctccaattaaaggtcactggcagcacttcccctaattaccatgccataaggacttggcaggttttgtggctgtggtgtgagcgagggcgtgcctgtgcttcagtgatgcgttacccagtgctgagttgttgagctgcaccttcctttggatgggatgcattttggggaggaggacggagaatctgagcttcttccctaccaggcatcttgtcctcactgggcctgtggggagggaggggctcatccttaggagctcagttgcttgtctttaggagctccttggggctgctggccaggagggagggaggtgacgggtcttgccgtcctcccccgcagcgtggagtcctcccgggcagggtgggattcctgggggtaggtggagctgcgcacggaggtgatgggtctcaccatcctccaggccttcatacatgcctgatgggcctgtgaagttggcgggagtgggcagtcggcgccctcgtacgcacctggtggtcctgtgaagctgcatctgccgtgagcgtccagtgggtcttcagaggttaggcggtcactggatgacccagcaacttcccttctaagtgcgcacccaagagaattgataacatgtttgcacgaacactcgtgtcatcgttcatagcagcattgctcatagtagccaagagatggggccaacccaaatgcccctcagctgtgactaaaaacaacacggctgtccacccagcgaggagttattgagccataagagatggaggctgatgtatgctgcagcagggactggccttgaagacatgatgccaagtcaattcaacagtatgaaaggccaccacctgtatgatgacattaatatgaagtgcccagaataggcaaagtcccgaactcaaagcagggcattcctgagacactgccgtggcctcatgtgctcactgtgggcagaaatatcagagtggccactgccctgggagaaccaggtggccgagaggcaatggcggctgcaggcagggacagctacatgcgctgctctcctggggtgtgtactgcgtggctgtgcggcggggagacagaccacacggtgaggtgggagggtggagcttgttagcaggcaccgttacttgctccgttacacttgtcttttgttaaccttttctacctttgagcttctttgaggacagtcaccattgtgtctgctttgcctggaatggtggctgatacacagtgggtgcttgaggtgagcgtggagttacggttctgagacccgtggctagcatgtgagctgcagtaacgaacagtgtagtcactgtcaggactgagcaagaccggcgttgaattcttgctcatcactgactgctggccctttagcaggctctctgatgtcttctcagctgggccatctcgtctgtaaaggacatgatgatagtccttggcttggggtggtgggaaacacataaacgtgacgatgtatgttcaggaaacgatgacggcaatgataaggtctcttttacccacatgtggcgagtttcttactctacaaggctacagagtcgcaggctcttcacctggagggttgggagcaccctcctgcccccgtgcttggccctgtatttgtcacggctccttcctttttctcctccctgccccagtctggctctggtggctcccagggttatctggggccggacatcaggacgttccaggagatgtccagaggtgcgaggcaagttctgagggaggttctccaatgcagggatcaagctggcggtaggtgacacattgagtggtgtgctggcggctgcagtggccgccaccgtggctcaggaagtaggttttctgggctaggactccgcactgagctgggtttcctgcctctaatctgctctccagcagtcaggcctgccagagcctggggacctccgtgagcacaggtacctgctccctcgtccccggcacgtctgcgtgggcgcagggccttctctggcatcaccctgcccgggcagcgccactcgcatgctctgcccccttgcagtgctctgctcccagcaagtgaaggtcatggcccttggcattcctggcctcgcgctgcccgtggctgtctctgtggcgggtccggccacacctgtggacaggccctttctgtcccccctggactttgaggaaatgaagtcagtattcaccagcacagcagagctttatttttctacacatacgcagaaacttccattgtgtttcctgaattattttgacccaagtcttccagatcctgcggagtgtccaccgcacaccctgccagcagtgctgccttggaatgcctttcgggtgtccagaggaagccgctggttaactgatagcgagaaagggaatggcggctcggatgtgagcattcttctccgagttgggtgcatgtggaaaaccggaccttcactgggtgggggtccatgcccagtctgcgcccgcttccccagtgccttcttgcccaagctcctccccaccccagggtctgactgcgctggaatcactgggagcatcctgcagccggcccacaggatgggcccagcagacactcacagtgaccaaccaggaggtcctggagatgggaacgggcgctcctgcagtatcaggaacagatctgtttcttcccacgtgcttttccctgaagaactgggaggaggaaatgttggtcttcttggtacacagcctgctgcaggtcagtggcggaggccgggtttcaacccaggtctcccaggtcttcctagcgtccgatgccgttgcctcttccatcttggccacgggggacatcttgcagtctgttacgtctggagtctcccgacagcccgccctgcgctggcctccacccactgacccaccttggaggcctctccgctgatttacctgcccgagtgctgagcgccgtgcctcgagactgggggcactcaccccgcacctcctctccgtgctgtgtaagccaagaagtgctcagtgattccaacaagcactaaccctgccttttaaaggtcattcctgtctttgtcagttcttaaagttcaagaggaaataaactgcttagagctggcatttctcaagtcaagtgtcagccctccaagccccccgcccggcacggaggaagcgaggttcataaatgagctgccgggtgactcagtgatgggcgaatgggtgccttcctctctccagctcctgctagaaaggaatgaaagggaaactaataattccgaaaatctcattttctccttaaagttttgttactcagcacggggaatgctttggagatgtttctttattggtcgagtgacagcgtttagaggctgtcagccctgggtacccaggacgtcacgcgcagggagggacggctcttccccctgggggcctgtgccacccgttcctgattgacgggcaggggagctctccctgcagcgcgagagacagcagaggccccatgaaggtgccacacctaacggggtattgacttctgtgctttgggtcaaggatggcaaaatcaatgggaaaataaacaggccgaatgtgcttcattacccaggtagcgctgaagcagctggagtggtcgtgcggcgcacaggcgtgggcggaggctgggccgagtgcaggcgccgggctccatcaattgtcatgggcactagagcctcagcttcagagctgctaattgggctatcgggtgattccaaagagagacgccacagagatcgctttgcctcttcttttaactatttgtctaatttgatgcaagcctcagttaaacggggtatgtgagccccttgatcctcagagctcaatctcctcagcctggtccttccacttggcctgctgcctctctagagtgctgcactcccacaccagacccggcgacgccggccagagcccagctccatgcctcacggctctgattcactggccacatggtgctgaagtcacggctccgacagcagctccgctgagctcccaggcccggctccttccctctggtctctccttctgtctctcccatctcccttgctgagctccccaggcctggctccttccctcctgtctctcccgctctctcccttctccctcctgcactctgtctcacacacggccccatggtccccgctctccttcccttccctccctccttccctggcttttctggtttcccgtgcagctgttgtgggatgtgcacagccccctcacactcacacatggcctcctggtccccgtcccctccccctcctgcctcccttccctttctctggcatctcctgcgcaggtgttcccgggagcttgttctccgttctttattcctcggtctctgcttttccttcttacataagttcttgtgctttgacatctcttcttgtcacttcagtgtggccagacttcagagtctctatctttggctccaacctctctcctaatctccatgatcagattttcctctgtccctggaagctgctaccttgctgttattgctcctgaccttggggccatgtcaggcgtgccctgctgtctccccaggggtcccgtgatctctgttggccactcgcatgaaggcccagcctccccaccctgacggcaggtgtgtctcccgctttcccaccagctaggccaggcggccttcccctctctaacctgtgctccggcttttctccctcgcacttagctcctgccccctccgccgggcctgggccgttgtgctccgccgaccacgggggctggaacagtgacggcggacccctgtgtggaggacagagcccggaagagagaagtcctggggcctgctggctggtcgagggagtgaaggggtgcatgatggtgtcctgggctgcagtgatgcagggagcgccccccgcctcctgtgtggggtgggttccggcccgatgcggggatttttggcagtccctgagacccacagtccctccacaggctggtgtcctccagctgagatgtgtcctgaggtttcccgggtcgcacgatggcgttctggaaattggagaagtgttggtggagtgggactgatacgtggatgctgtgattttcgttcctttacgcgtcagtttgagggaactcgatggactttcgctagaacctatgatccagatgaggaaggggcaaggagcccagtgtggcaaccctggccccaagtgactcctctgcccacaggccgctttccaccaccggctcagagcctccccacctccccaccccggcccagcttgtctgtccatatctgtttccaaacacccttcccgctggctctgccattcccaccctgcgtcatccccagtcctgtccttggttcctggcctggctcctggaccatcacagcagctctctcctctctcttcctgggctcaggcatcttctcacccttcaggaacggggaaccagggagagggggcacagagtctggaccttgggcatgctgagaggcagctgagggttaatgaggccaagatataatgtcacaaagtgcaggccacgtcccggcggtaccgcctgtgagccaggtcccctggaatgccactctcccccagcatttgtgtccctaaccgagaaatgaggcgaaaacgtctccctccctggcagggaggttcagggtgtgtttgaagaaatggcagttccctttgcccaaccacacgcatcttcattgggaaaatctggctccgcacctcatctgaatgcacggccctgtgcagccgacagcagggctgctctgcgacccgggagtttccagctgcctggggatggacttggcgtcagagcccagcgctgttctttgagtcctgctcccatttggaaatgaggggccccggaatcctgggcttcctaccagaggcctgtgatcgtgggggaggcgctctgcacatgagggtgggtgggtgggtttagtcagagggtggttattactgtttttgcctttgaatttgtgcatctgcagtggccgaggcggggagccggcaggagcttgctctcttgtgggggacatgcagtcgcccggcctcaggtgggtgggaactcatgtctttagttacccatgctagcgtttctaaacctcatatctgtggtatagggtagtggtatagggtattggttggtaacctttctctgtaaagagccgtatggtaaatacttttggctttttgagccacgggctctgtcacaggaaagcagccgtaagccatatgtcaatgaatgggagtggctttgttccaggaaaactttccttacaaccataggtggtgggctgtttgctgagcagcagtgcagagaaagcccccagcctcgaggctggcccacccgcctgctgcctgcctgttggccatgtggccccttggggcttctgtcctgtgcattaggcgagcaggcagccagcgctgacggggttgacggacgcacggatggtctccttctctctgacctcgggagacggtagatgtgtccaggacacctgctgtgcctctctgcgtcactccaggcaccggattatcttctgtggcttctcttttttctccaagtcagagctggagggcatggggcggttgtttagtagagcctggggaggtgacttgcccccttgtctctgcagttctcatttcctaatctccagcagcctggggcggaagtgaatttatggtctccctgcggccgtgcttgccggggctccccacccagcatttggaggagccctgcccaggcgattacaggttggtagctgatcagctaaactggattattcattatggttgggagtgaattgaaattgcaaagggcaattttccttctcacatttcaaggtcagatgagagtatttgccgtgtggcctctgtttatctgggaatgcaaattgaatttggtgattccaattgacgagatgttgggaacagagcgttcatcagaggcagagtcggggagaagtgaccgggaggccaggctgcagcttcagagcctgctcccctggccgttcctttgattggtaattatttcagcctttggtcttctcattctctggttttgtttccgctgtttggatttttatttttttcagaaaaatgtgtattgacacttggaggcatttaagattgggattagatagagtaaataacaacagctgcgtgccacgctgagcctgatgtcctggggcacctgccctctcggagtcccagccccttccgagtctgaacctgccccccagggaggagggcttgcccctctctttcacctgcaagtgcccacctgtgccactgagtgcggctgcccggccccaacctcatgacggtgtgggggctgagctggccacgtggacttgaacccgagtcttcagcgaggcattcaccccctcccaaccgctggctcggccaagcccctgcacttgccctcttctgagagacacatggaacgtgtcacctgtgtggcagtgctgttgcttggcccgactggggcatctccccccagccctatgggggtgcccaaggcacggccctggagaccctggaggtcagtacagtggtgtcctgggggacacggtggcttctgagcccctttgtccttggggatgtggggactggggccggtgctgccgctgtcctcccagattctggtggagatttgaacccaagtcctcagcgaggcatgccacctctgagccccttcctcctcagggatgtggggtgggggtggcgctgctgctttcctcccagattctggtgcagactaaacgaggtcatgtacccaggagcaccccctgcagccgaaagctgctcgggcgagagtgggaaactgctcaggaggctcggcctccgagttcagacatggaggggccctggccgccagcctcctctgctttcttcttcagtcctgggtagatgagaagcataaactctgatctgaatctccagcagctcctgatcagggagcatctcctggctcagccgcggaggccccgtgagcgtggggcaggggaggaactgggacctcttgatgctctcgtgcttcacgacggacgcacgcgtctgatccagtcctcccctgcccattcgcagcgaggggcctggtggcctcagttccatccaagaggaaggagaaggccagaggtggatggagcgctcagagcctccggatagtggggtgacgtgggggatcctgcaggtaggcgggaccctctcaaccctgtaggtcccagggcagttgtttccctgcctctctgcagaggcagctattgattcccattctcaggcggctcctcagatacacaaggagcctgcgtctgtcgtgccggtctccaggccggagctgggggcttcgatggcagagacggctcctctctgtggtgagtgggggcccttccccggtgttccctcttagcaaggagcgaatgtggatgcctgaacatgctcagtgttgcttctgccctgtctgggaaccctggccttccgggagagtatttctgaaaccagttcgtgctccatttaaaattttgcctctagatccaggctgctgcgaggctccccgacgggcgcctgtgaacacagctctgtgtacagttcttgtgactggaggacgagcacgtgtggtttgggaggttgttctgtccagcgatatcctctttcagaacctgtgggtgcttccggagcagagcagggcaggctgtccactggggctggagcctgtcctctgctccctgctagcctcctggatccttgtctcctgctcccgcgcgcctcctgcagaacggcactgctttttgtctcgtgtacctgctccaggccaccagttagaattcactgctccccgctgggtcgcagccctcccaaccgctggctcagccaagcccgtgcacttgctctcttcctgagagacacatggaacgtgtcacctgtgtggcagtgctgttgcttggcccgactggggcgtctccccccagccctatgggggtgctcaaggcatggccctggagaccctggaggtcagtacagtggtgtcctgggggacacggtggcttcatgctcatgactcagtcgctcaaggcttgaatttactcatctgtaaaatcgagatgattaaaaatcatacttgtgggtgggtcttgatctatgttcctcagatagctaagaataaaggtgcttttagagattttgccaaggttcgaatacaattttattagtattttcctagtttcatgccagacgtcatcactgaggatcaccgtgcatgcggctgtgtttacatcttaacccttgaggccactggcaggctcaccgtgctgcgagctcaccatgtcgtaaccatctcgggctcaccatgccgcgggctcaccaagtcgtaactctgtcttgggctcaccatgccgcgggctcaccaagtcgtaactctgtctcgggctcaccgtgccgtgagctcactgtgtcataaccgtctcgggctcaccatgctgcgggctcaccgtgccgcgggctcactgtgccataactgtctcgggctgaccatgctgtgggctcactatgtcgtaaccctgtcttgggctcaccgtgccacaggctcaccatgttgtaaccgtctcaggctgaccgtgctgcgggctcatcgtgtcgtaaccatctcaggctcactgtgccgtgagctcaccatgtcgtaaccgtcttgggctcaccatgttgcgggctcaccaagtcgtaaccctgtctcagggtcaccatgccatgtgctcgctgtgtcatacctgtgtctcgggctcactgtgctgcaggctaactgtgctgtgggctcactgtgtcataactgtgttggggcagtcatcagcccggaagcctcggtgtgaccccatgcccatgtgtgaacagtgtgtctgggcgttatgggttaggagaccgtctgtgttcgggctcacttaacaaagtaccatagtcggggatctgaacagacgtccgtttctcacagctgtggagctgaggagtgcaggatggcagtgccgggtctgaggagggctctcttcctggtttgcagatgaccagcccctgtcctcacagggcagagggagaggactcgagctttgtgctgcttacaacttgcgcatcccattgggagcactccgccctcaggaccgaatgccctctcaggggcccccgtttggtcaccatcacattggggatctgggttttcacaggtgaacttgggacgacacaggcattctgtgcactgcccaaaacgtgctggttttgccctgggcccgggcgtggctgtggaggcgtcttcataccctgtggatccacactccaggcaccactcagccttgtgactggggcgggaacagccgcctcataccatcccaagggtcggatcaggtcccgggagcacacaactgcttcgccttagaccccagcaccacctgtcctggcctctctcagagcctgtctcccgcggtggccacgccgtgggctcctgtgctccagagccccatggtttctggggagagtccagtgatgcctgtttgtgcgatgcctgcccttgccttggcgggtgctcacagtgggctgggacttgggagaaggtagacaaagagtgtgtgggaggaatgggtcgtgcgtggaagagctggctcagcagtgtcttgaggaaggtcgttaaaatgtctcctgccactttgggatacattgtgtcctttcgttgttccttgaaagtcggtattcttaggccgggagtttctgatgaagatcacattaaagtggccggcagtggctggtcacagcgcagatggatgctcagaagctcagagcttgttctttgagtagaggctggctcagagagccattgattgataaacatgcctggcttctccttgaggaactaagaacttcattctgaactcccagaggctcacggaaatgccagtgacctcagagttcagtccaagcatggaactagaggcttaattttttgagttttctcttctgtacctcagaagaaaggccgggattgaacagagagaacatccccaacaggggagagcccgccgtcgctggtgccgctgtggctcagcgtgctgggtcccggtgccctgcagggcctgaggggtgggaggcagaggccatcttgccggagcgcctctacctgcacgcctgggtgggcagcaccacttgttggcggtgtctgaaacgctagatggggggcctttaggctgcactctggggccgtccactttgtgccggcccttcctgcacctccagggcttggctcctaattgccacttcctcgggtcttcaggacagggctgcctctgctggaccttcccctcctctcgagacgccggcacctcatggacacatgccagcctgctccttgccttcctgcccctctggctcagcccgctctccacgtcccgtgcagaggccgttcctggtttgctcgtcctcttgtgaccttgcccattgctcccggttggcccaacctcgggcccactgggctgaccacgaatgagcacgccagctgcccattggaagcgtccccggctctgacaccgcctgtctctgacaccacaggctgtcccgccacccctccccgagggcccccccagcctccggtttcccctccagtgtcaggaggcacctgcttgctggtttgctgatggcctgtcttctgcccattgtggttactgagttgttgcctcgcagctccacactcccttctctgagccctactttgcggtgccagggctgcagcccacacctgcgcttcgccagggagtgcctgtcctgggggcgctggagagggcccggggtcagcctgcaggcaagtggggcagctctttagccgctggccttgccccctcccagcagcctgccagcctgcagattccgtagcgcctagaggtgccagctccatgggctgctgccctgttctcagaggcctgggtccaggccctccagggtccccatgcagacaccagcatggcctccctcagcagcctcagttcctgttccatggggcccatctctgagtgtctacattttaatgatgtcagcctctgccccgtgttcccacagcccaagggctgggagctgcttcctgaagtcactgcgtccttggcgcctgagggtcttccttctgctctcggtgacctcagtacctgcacccgccgtgagattctctgctcatgccacacgcgtggcttctttgcttgagattcccaccccagtagaatggaggcccagcgagcccaggctggctgcggtgttccgtgctgccatctctgctgcctggaacggcatgtggccgtcctcacccacatcccgtgtgctgaacagactgggtagactcgcctgccagtcaggtgtgagtggcaaacatcccggacatggttcttggcgagcattccacagtgtcgtctccttgtcacgtcttggtgttggatttttacagtctagttctgttgttcagaagatttcagtgtcagccatcaggccttggggatgtggccctgatgacgcgggcccgagtgcttgcacctggacggtcctggagtgggtgtctctctgctgcccacgccgtccctcagccgggaatgtgtgttgctctggttcacttctcccatctccgttcatgatgtggatttcactgccaggaaggagaggtttgcttcacaacctggcggatgagcttttccagcctgtgctcagccccacgcccctatgcctctgtctaccctctggggtgctgcggaacacacgcttcacgctacatcctgcagccactgcatttcctcagaccgggtctgtaaggaagcccaggttcagctgctcgatgcttgacagccagacacgagaggcgagagtggcggaggaagagcaggcgtattcggggagccagcggatcggggagatggtgacctacagtcacaaagaccatctgaagtcagtacagatcccaggctctagttatgctaagggtaggggcaagaggagggggttgggtccaagaggtgactgacgatcgtagagatctgggtgccagcaagggtccgaggggtcgggaactgctctgtccttggccaggccacagcactcctgcagatctttaacaaagcctagttagctgtttccacacttcccctttgatcccagagtgagtttttgcattattactctttgctatttttgcattattatctcagtactctaaaagctaggagtaggtaaagaccctttaagcagtggcggagggatatgctagttctgctgagccactgttacaggccgagggccgggcttggggcgcctcggtgcctgccgtcctgcctcaccgaggcggcctaggctgcagagagtgggatgtgggcctgagggaagcagctcaggccacatccagttcctgggacccagtcttggcccctggctctattgcactgagccctggtcctcaagtgccgggagcctgggctctgaagcaagacagccactgtcctgtgggtgtgcgttactcacatctgctctgcgtggcggggggactccagccccacatgtgcccccacacagatgtgagcgcaccctcactcaggatgcagggtgtgggtttgctgggcccccttcaaggctgcccagccatcctgtgctgagctgagggtgcttcccagcgcagccccttacccttctctctggccagatgcctgtgctgtgcctgtcacctgaaagacagcacctgtcacattcttgcctttgcacattctggctttgaagcagagtacagggaatggtggcgttcttctagttaaatgaccacacggagccgtgatttaaagcacttgtgaacgttcccacctgaattcagtgattcaagagtagattttacagcccttgagtattaaattggcccatgagtagtttaaaattgaactgggtcccaaagtagcctcataatatgtgtttcccatgagctttgtgcctgctttttattttgtcttgcgtttttggttatggagcgcctggagggggcaggggggccgctggccagtgctgcacctggggccagtgtcagtgtagggctttccgaggcggctgatgggataggaaagactcagaacggtttcctctgctctcacgtcgcagcagtcaacacagaagactctgaccagatgtggggtgtttccccacccaccaagcaagcagttggttctgcctgggacaccagccgttcagctcagtctcactcagttctgttctgacactgtctacctggaggtgctgtcagaccctgggtgagggctcagtccccaccttctggtgctggtcgcgagccgcaggtgtgcttctgaccggccagctgtaaactggggttcctaccacccagttgggattccccttgggtttgataaatttgctggagtgtctcacagaactcaaggaaacgtatgttcaccagtttattatgaagcttactgcgaaggatgcagatgaatggatgcgcagggcgagatgtgggggaagggtgcagagcttgcgtgccctccccaccctccgggaacagtgggagctctcccagttcccgtgagaagcctttgggttttgatggaggccgccaccctccgggaagagtggaagctctcctagctctggtggaaaacctttgggttttgatggaggccaccaccctccaggaacagtgaaagcgctccctgctccggtgagaaacctttgggttttgatggaggccttgtcaggcggacataattgactccgcccctgctcattggtgaaccactcagccttcagcccctctccttccccagcttaggggtggggctgaagtcccgagcctctagtccggcctcgatcttcctggtgtcccgccccatcctgcagctgcccaggggctgcagccaccgtcagtcattggcacatggaaggcctcagtcgggaaagcccgagggttttaggagctgtgttctggtagatgggttgacgatcagttacatatttcacaagatcacacgcggctgaaatgagacgcccgcgtcctggacgccagtacattggccccagtctgtgggcttgtgtggcttctgctggggccggctgagggtggccaggttggggttcccgccatgcttggctgggtcaggaccgccaccaagtcccttctgacgttctgtgagtgttggattcacattcactttcaacttatcctttatttcaagacttctactaagttacagttaaaaaccccgtattcacttcactcaaacatgagtccagtggagaccaccgcccaagaaagtgccatccccccagccccgggatgaagctttcccttccccaaaccaccgcccaagaaagcaccatccaccagccctgggatgaagctttcccttccccaaaccacctcccaagaaagcgccatccaccagccctgggatgaagctttcccttccccaaaccactgcccaagaaagcaccatccaccagccccaggatgaagctttcccttccccaaaccactgcccaagaaagcgccatctgtcagtccagggatgaaacttttcctcaagtcatgcaactaaggccgagcagaagcaatcaatggctgggaaggtgtgaacgtgagggtggaggtcatggccccatcccacattcctgtttccaagcagcctcctggctctccctgatggttgcctcacagggctgtggtccctgttagcttttctctatcccagtgctgtgttttatttccttgagatttagttaagatttcctttggaaagaagtttgtggtactcaatagagtcgtgtgcagctcccgtgttccagcgccgttccgctctgcgcctgcctgggctgtctgagtagggatgggccctccctccgcggactcgcaccctccccggtgtggcctctcttctttcctggctgtgtcctttcctgggagagctctcgtacctcactgtggagtcctgactctcctcctctcgggcggcctctcatctctcctggctgtgtcccttcctgggagcacctgtgtcccccggctgtcccatgtggggaaggtggagtcctgactcaccctctccctgggacagcctctcctctctgcgcctcactgtgcccttcctgggagcccctcccgtgaggaggtggagtcctggggttcccggaatcacagaaagccgttgcatcatgggtgggttctgcagtcagggtcagtggacgctgtcatttgtccggtcccaagtcagctcctgaaggacagagagagaggggcaagatccaaacccctgaggcccgctactgccaggccacgaactcggaagctcaccaagagtggttgggagccaccaaaggcttaaaaatcgcatgacccagcccctctctgctgtctgaggagacagcttggtgcccagtggcagaggggtctagtgagagccgttgggaggctattgtggtaacgtaggtgacaggcaacgagcacagggactgaggcagtggctgtggggaccatgcagggaaaagggaggtttcaaaagcagaattgaaaggaaccatcagccacccgaaggggcggacagggagaggcctcttgggcagcctggagttggccctgcctctggcgtcggcccacaggaggcctctcgggttcccagtgcttagcgccaggctgggctttcaacctcacagaatgtttttagaacaggccccccaaccaggcgcctggcgcttgcttccccgcaccacgctgcacatctgcggtgattcagaggggaagcgctggctctgcaatctcgctcattcagaagtcccgtctcctgaagggctgcgtcgccgacaatttttcccattgtgtgtggagttgagctcccttccccctccctgccgtgttctgggatcaccctgggagtctatttgaaatccagaaactcctgaaaggccttaagtagctattcagcagtgcggaaatggcagtgagggggttgcacgtgcagctctattttaggatgtcctggtgggctcgttcctggggtggggcggggcttggtggggtggtcaccccaggcttcattgctttgccctcttgtctctcccatgcagcgcccgggggctggagaaggccaggcagcagctgcaggaggagctccggcaggtcagcggccagctgttggaggagaggaagaagcgcgagacccacgaggcgctggcccggaggctccagaaacgggtcctgctgctcaccaaggtgatgtatgcccttacatcttgatcagagtcgcagggagctgcgggtcagtgcacacctggttagctggatctcactgtggaggcaggagtgctgcagccgggtcagggttggcactttggccctgggttgccaggagggttctgggaatgccagagagtgctcagccccggtgctccctgtgggactctctgggcctgctgcgtgccccacccttttcagttcctccagcatctcagtgtccacccctggcctggtgctgagctctggagagggttccctgtcactgcggaccccctgcaggctcccacgtgccttgcagtcagcaccctcatgctttcccatccagtgatgccatttacactgtgtgggtcttggcctgggcttgggatgaaggctgtcacctgcttccaggtgtgccccacctgtgggtggctccatggcccgactctaagcctcagtgcctgcgggggttctgatgcctggcaccgtgagcagaggtcgctggagcatgaaagacggtttttgtgagttctgtttaaaatgttccttgggcactgaaatttcagaagacaaggcgggaaagaagtcaatctgtccccagatgctctctgggccagggcgggtgtccagtttgctgggcggagactccccctgcctgcctccagctagtgctgagtgggcggagggctgtgccaccctggcccaggatgcatgctgcacctgtcaagtactgggagttgtgcctcatggatgtttacctgttcttgatcgtttttgatgaaaaccaagcctctttgctgctgggacctcttggttgtggagcttttagaaaatgagtaacatttccgttccaaagatgctgttttacagcttctccagctcgctctgggcggctccatgctgtctcctaaaggaaaagttcacatgggcctaggtccctcgggcactgactgtgtgggcacccggaacacaggctgagctggcccctgcgcatagctcagatgctgaccccaaagccctggctttgcaggtgcaccccagacaggggacactccaaaatgttctcacatggcttttcagccggagctgtctgctgcctctggcagaggggacacccagccctgctgcatggtcaggcacggtacgtttctgtggagcaagctctcgaccttcctctgtgttcccttctcttccacaccgtgtctgctagtgtgtgagcttctaagcaagatgcgtgaggtgcacgtggcgtggatgtgtgggcacagcccttggaggattcgctcttctagcggggccaggcagtggcaccagaccagcacctgccacgcacctcaacagaggtggacgccgtggtggtgccgcagaagggcttttctcaggaggtggcattcctgtggggacccaagaatttcccctttgcgaaagtgtgtgtggagaaccacggcggagggagagaaggcaggtcatcacaaagcgctgctgcagtcacctcgaggcctggagcgggaggagacagcggcttgggcccacaggccacagcacgcgggctgaccactgcggtggttcgggctgaccactgcgggggtttgggctgaccactgcgggggttcaggcaagtgcagcccgaccctgccgccgaggagaggcccgggaagcagagggggcgacactgtgttctttcagagtggcgggacaccttagctcggtgatctttgggtgcgtgatgacgtgctgtggtcccgtgatgctggaagctcagagcttcctgggggaggaagagtgggagggctgggctgggagctgggcctttctctgggatctcagatgtccctcattctctctgggtctcagttctcctttctgctaaactttgggctcaggcctgatgaccccgggtgcctgcgaacgtggcctgatgaccccgggtgcctgcgaacgtggcctgatgaccccgggtgcctgcgaacatggcctgatgaccccgggtgcctgcgaacgtggcctgatgaccccgggtgcctgcgaacgtgctgtgttcgggtggcacccccttgagtgcaccttgttgttgggcccagtccccgattctgggtcggggctggggagtgacatcggcccacaccggccaggcgggcagcactttgggttggtcctccatgcgtggcctgggtcttggcctgggctacaagtgtggcccccacaggagggcagccccgcccggcctcagctgaggctcatcccttgggaacctcctggtttcttaagtgaggccagcggttggaagctgatgggcagagttcccttgacaggtcacgtgtgggcctgagtgttcttgtgtgctgggtctggcctgcagcctgtgacccacgcgacactggtgctgctgcccacaccctcttagtgccagggctcccggccgtgatgaggagttacatgcagtcactggatgtctggtgtggttttcatccctgtggggctccctcatggtctagtggagccccgcagccttctgggaagtctgtgcccggcttccttcctgccgttgctctttgatggccaccccggcccgctcagggcaggaagtttctgttcttctctgctctgctttgcaggtggagagcctctggcactttctggcccgcgccagcctcaccccgaccctgctgtgctcgcgggcctgctctgtgttagcaagaaggtgggtattgatcgccgggcatggactggttgtttatcctgacgaaggattgatcccagtcgcccgtgtagccccaggccagggatgcaggatccgtccagccagccgtgatgaagctgttcactcagccatctggagggagcggcgtgcctgctgctctgggtctgtgtgccttggtgtcggccagtgcccacctcagctctgcatggcagcccgcccagctggggtggtcgaggagcgccttctctcaaggcgcacccaggagggctgcgagcctccggctggtgggggctctgggcctctgcttcccattggaggctctccttgtgtgcttgacattttagtacacggtgcttggagtgtgtggttttatttcgagacctttattaaacggctctagtctaaggatttaattgttactgatagctaagagtataattaccttggtaaaatatcatgactattttaagcagttgaaaattggcttctggaactgggtgaacacaaaccattttcctgtttgaaatgagccgtttctccagtgccccaagcttccgcagtatggctgcagagtcttgtttctggaatatcagtgatacaagctaacttttagcaagaaacttttcaaatgacagaaaagcctccgcttcccaccccttgttgtctgcactccaccctcccgccctgtctcacagcagatcagttactggaggccccaggcttggggggagcagttgacgctgggtgtccagcggcgtcggactcacgtcgtggctgctgagcacagactgtggttgtcatggtgacaccctgccctgggaacccgcacactgggaaagacagatttgtgtcttctggagttgttgagggtctgagtttcgagctctgggctggggtgttgggtctgggctggctgaatgagcacgttcctcggccacctcctccgaagctggggttggtgacgacacacattcccctctcccacgtcctcgctgcctggggcatcagatctgcccactgccataaagttccttttgtcaatcaaaaaaccgtccacaaacattcctgatgatccacggtctcaaaaccaacgtggctgggcctgctgtgggattgggagcggatgagctttaacaggagggctgggaccctggacacggctgccaccctcagtgatgggagagtgtggagagctggtgtctgtattcgctgggtgcagtttaggccagatccatccaggagacagctgaaggcagatggagactgggcccaagaaggcgggggctgctgctgtttaagaaacagttaaatagggggcagaatgcaggaagtacaaggggggacccctcagaagagttccatgttcttcctgcctcacatccagaagagagtcctagaagaagcctctgtcctcccttgagaatctgctgtcctcctgaaagaagcctctgctctcccatgagcagccgctgtcctcctatgatcagccactgtcctcctggaagaagccaccatcctcccgggagaagcctctgtcctcccttgacaacctgctgtcctcctggaagaagcctctgtcctcccatgagcagccaccgtcctccctggagaagccgccatcctttgggagaagacactgtcctcctaggagaagccgctgtcctgggagaagccgctgtcctgggagaagcctccgtcctgggagaagccgccatattcctaggagaagctgccatcctcatcctcccaggagaatctggtatcctctgggagaagccgctgtcctcctgggagaagctgccatattcctgggagaagccactgtcctcctaggagaagcctctgtcctcccaggagaagcctctgtcctcctgggagaagctgccacattcccgggagaagccactgtcctcctaggagaatcctctgtcctccggggagaagcctctgtcctcttcggagaagctgctctcttcctgctatgttcctggcccagaggcagctcttgtgagcctgagccatcccagcctcttacaggggccagagccgcttcctgaggcctcctctccatgctatggtgccttcccgagggaatctggggcaggggagccaggcttagctcagggacccctgcgcgttctcagttgactctgccagggcctcctctcttcttgggggtcgtttctgtgcccaggatgctgtgctggagtctcccatgccctttctggtggagggcccgcctggatattggtgttgattgttttgaagacatgttgctcttcgtgtcctgtgtattcactcggctgcctgaggctgggctcctgtgtgctccctcgccagggggttgctgggctgcatccccagcctccttggattcagtgtctcggcagggttagccgcgaggccaggcccagaacaggacatgcgtgttccttgctgaagctcagtgtcatctgtggagccggcctgctacgggagaggctccaggcccccttctggtccatcctaggaaggcagtgcagtcctcgctgggattctcccaggcctggggtttgaggaggcccctccatttccttctgactgtgtctcttctcctctgcaggattgtgtgtgctgagggcagagcgagggaggctggctgccccgagggagctgaggccacaggtgctcagggtcagagtggcccgtggatcatgaaggagtgtgttctggtggccgcaccctggccatgacaaaggcgggtgtggtgcccacgggaagagggcagggcctcgctggcaccgtgcccaggctgcgcagcgatttagaaatgggcccacgttgctggagtgtttttatttttgaacaggttattttcatctctcctggaatagcacggtggagacacacctgatgcatgtttttgctcccataggacgtgtgggtggaagggacatggagcagaggcaagcgctgttgtttattttgtgttcatacagcttgggcagcttccactttggagaccaccccaacaaggttaatgtagctcatgcctgtcccagccacagacaaggccgctgttcctccagctgagtgccacttcaagtcactggcttgcctttatttcaaagccctgatcttccctgatggtgtctgtttaagtcctgggatccggcacagcctggagtgaggacgcggagccagggactcccaggggcccaggactctgcccactcttggatcagagagcaagattttggcgcagtgaggtcccacccaccccacgtccagtctttcttttcactgttctcgtgaaacacattgcgtgtgcaaagatcatatagaacatatacatacagctcaaagaatacagcaagttcccgtgtctcagtcccagtgtaagaaacagaacagcctccgctgtcagacggagccgtgctctaaacgtagagcagtcccttccctcatttttctttctagtttaattgtgtgtatatctttaaacattgctccgcttttcccatttttatgttttctgtacatagagccacgcttctgtggcttctctttgtttttatcttagcgttatccttttgaccttcgtccctgggaatgcagcgtgttcctttttgctgctgttgtgatgctgtgtgcagggagtgggtcacggtttagtgacctgacgtgtgaggtgttccagttttgccttcctgcggtgggtgctgcacagtgggtgtggctcagccccacctcgggaggcttgttctcagtagtctccgtgttgaagtttagtgtgcacaaattacagacccaggacagactctagaagagcaggtagttagcaaccccagcaagaccctcgtgcctggttccagccgctccctcagctccagggcaagcgcctcctgacttcacttccctgttttttttttgtttgagacagagtctctctttgttgcccaggctggagtgcagtcgcgtgatctcggctcactgcagcctccgcctcccaggttcaagcaattctgttgcctcagcctctcgagtagctgggattataggtgtgcgtcaccacaccgggctaatttttgtatttttagtaaagacagggtttcaccatgttggccaggttggtctcgaactcctgacctcgtgatccccctacttcggcctcccaatcccaaagtgctgggattacaggcgtgagccactgtgtccggccttcaattccctgtttttttttttttttttttgtcgttgctgttttttgaaatggagtctcgctctgtcacccaggctggagtgcagtggcgcgatctcagctcactgcaacctccgtctcttgggttcaagccattctctcgcctcagcctcccgaggagctgggatttcaggtgcctgtcactatacccagctaatttttttgtatttttgtagagacggggtttcaccatgttggccaggctggtcctgaactcctgacctcaggtgatctgcctgcctcggcctcccaaagtgctgggattacaggcgtgagccactgcgcctggcccacttccctgtttttaagcgtcacatattggaatcacatacctgtactctttagtccctggcttccattacacgttatctttgtgagagtcatgtgtgttgtgtatagctgagatttgttgatttttcttaattactctgttaagttttccattgtataaaaataccactttttaaaatacacttggctgtacccgacatcggatggtttccagcatgggggtgttgactcttgctgacgtggacgttttaacacgtgtatgacgtttggtgatcccctgggtgcccttgcgctgggcatgcccaggtgtggcatagggtcagttcccggggctgccacccccgccagagttactgtgccaggtggcactcctgttggggtgtggatggtgctggtccctccgggtcctcacctcctgcctttggttttctccctggtgggggcctgtactcgaaagctgttgttcttactttcctgaggcttggtgaagctgagctgctttttacatgctcactggccggttagacaccgactcctgggggcacctggacaggctttctgttcctacccctttgggcttttatttttattttattttattttaattttattattattttttgagacggagtctcactctgttgcccaggctggagtgcaatggctcaatcttggctcactgccacctccgcctcccgggttcaagcaattctcctgcctcagcctcatgagtagctgggactacaggcacgcgccagcacgcccagctaagttttgtatttttagtagagatggggtctcaccatgttggttaggctggtctcgaactcctgacctcgtgatctgcctgcctcagccttccaaagtgttgagattacaggcgtgagccactgtatccgtcctgggcctttaaatgattgtttgccttgttcttactgagttgtagttctttactctggatgtgaaagtcttttgttgaaacgtatttagttatcttctcgtagcctgtggtttgctttttcactctcggaatttctctgttgatgttcatgcagccagctcaccgacgtttgctgatgctggtgcttttgagtcatgattaaacagtctttgcctgccaaagttgtgaagatactcagtggttttcttctaaacactttattgtttaccttttatatgttgctgcttttgttctgtgaaacatgctgttgatctggcagcctctattgcaaggccgccttctccccacgcgtggcgctgccatggccgtggcccggggacccctcgtggccgtccacttcagggctttctggtgtgttccatgggctctttttttatttgtttacgattccatgctgtcgtcgttgcctcctccttccagtgtttccctgtgtccaggtgaagcacagcattagcttatcttggcattagcgtatctcgacattagcgttatctcggtctcggcattatctcgatattggcatatctcgacatcagcgttatctcggcatcggcgttatctcagcatcggcgtatctcagcatcagtgtatctcagcatcagcgtatcttgacatctcggcatcggtgtatcttggcatcagcatatctcgacatcttggcattggcgtatctcagcatcggcgtatctcgggatcggcgtatctcgggatcggcgtatctcggcatcggcgtatctcggcatcggcgtatctcggcatcggcgtatctcggcatcggcgtaacttggcatctgcgtatcttggcatcggtgtatctcggcatcggcgtatctcggcttcggcgtatcttggcatctgcgtatctcgacatctcggcatcttggcttcggcgtatctcggcatcagcgtatcttggcatcagcgtatcttgatacctcggcatcggtgtatctcggcatcggcgtatcttgtgaaccatgaatgccacatgttccaccatttaccttgatggcctttaatttctctcagcaagtttgatggattttagggtagattcttacatgtcattagactttctgccctgcgtatttgaacattcgacgcagttttcatgttgtcttcttggactttgatcttctatgtatgtgttcctggcctgtggatgtaccattgggtcctgcacattgaccctgcacatgacaaccttgctctgatgctggtgtttgacgtgcacactcatactctctgagagatgctggccatgcttccccaccaaccccatgcctctcttctcccctggctacgcttccctgccagccccacacctctcctgtcccctggccatgctccctctccagccccgcgcctctcctctcccctggccacgcttccccaccagccccgtgcctctcctctcccctcccctggccatgcttccccgccagccccttgcctctcctctcccctggccatgctccctttccagccccgcacctttcctctcctctggccacaatccctctccagccccacgcctcttctctcctctggccacgctgcctctccaaccccgtgcctctcctctggccacattccctctccagccctgcttctctcttctggccacactccctctccagccccatgcctctcctctcctctggccacactcccactccagccctgcttctctcttctggccacactccctctccagccctgcttctctcctggccacactccctctccagccctgcttctctcctggccacactccctctccagccctgcttctctcctctggccacactccctctccagccccacgcctctcttctcctctggccacactccctctccagccctgcttctctcgtctggccacactccctctccagccctgcttctctcctggccacactccctctccagccctgcttctctcctctggccacactccctctccagccctgcttctctcctctggccacactccctctccagccctgcgcctctcccctggccacactcccactctagccccgcgcctctcctctcctctggccacactccctctccagccctgcgcctctcccctggccacactcccactctagccccgcgcctctcctctcctctggccacactccctctccagccctgcttctctcctctggccacactcccactccagccccgcgcctctcctcttctctggccacactccctctccagccctgcttctctcctctagccacactccctctccagccctgcgcctctcctctcccctggccacactccctctccagcctcaagcctctcctctcctctggccacactccctctccagccctgcgcctctcccctggccacactcccactctagccccgcgcctctcctctcctctggccacactccctctccagccctgcttctctcctctagccacactccctctccagccccgcgcctctcctctcctctggccacactccctctccagccccgcgcctctcctctcctctggccacactccctctccagccccgcgcctctcctctcctctcctctggccacactccctctccagccccgcgcctctcctctcctctggccacactccctctccggccctgcttctctccatgcccctttcctccaggtgcagtgtcatggaggaatgatgacagtaggcaccttgtctccttcaggctgtgacgggcgctttggtaatccatcagtaagcgtggtgtgtgctagatgttctgtgtgatactctttactgaattaatgaaatcctctccaacttgtgcttttctaagagtctttgtcacgaaggcctaccccataaattttgatgcgggttgtttttgttactgttgagttcaaaacattttctgatattctctgtggatttagaaagtctggccttccagcaggatttaacgcatacaaagcatataatacaggtggactggccagctgaaaagggattgagaaggagaaacccagactcagttcactcactcgatcattaatgtttcattccccaacttcttctttttgggggggcggtggggggaatggagtcttgttctgatgtccaggctggagtgcagtggtgcaatcttggctcactgcaacctctgcctcccgggttcaagcagttctcccctcagcctctgagtagctgggactacaggtgcacaccaccatgcccggtgaattctttgtatttttagtagggatggattttgccacgttggccaggaacttctcacgtcaagtgatctgcccaccttggcttcccgacgtgctgggattacaggcatgaggcaccgcgctcggtcattccccagattcttactgtgcgtctcctgtgagcctggcacatttaggtgctgtggaaaacagcagggagctgcacagcagactcggagctcaagggcccctctctaggtggggctggggcaggtgtcagtcgcgttgaggcggtgatggctgctgtgaagaaagggaggcgctttagggctcgtgtgtcagggagggtgtgggaagccggtgaacaggcgcccttgctgagcccagaaggtcactgcggggagagctgtgtccatctgccgtgctagaccgtggtggggcttggtttgtggtaatgatagctgcacgggtacttgggaaggttgtggggcgaggtgccacgtctccccggcttccccgtggcaatgccgtaggtggtcgtggtgcagtgggaagaccaggggctttggcgttagcacagcctgtgttcctctccgcgatcggccgcttgtgtaggtttctgtggccccacaacagtccccctgggctgcctcttggagccacaccaactccttgtcctggttctagtgttgagtaggacttgtccttcacccctctgtgataatgggcgctgggtgggagcccgtgggagctctgtggtgggccttggttcgaggtgagcaccgccctcgctcacgtgggtatctcctgggtcgctttgcagatgggtcgtggagccagtcttgtacttccttccacgtctttcctggatagccattctgtggtttcttcctctgccccagtgggagcctaaatctggctgtgtgctcctccctcccctgagggtgtgagatctagccctctttccctagagcagagcagagcagagcagagcagagggcctccatccctcccacagaagagcctgcgcgagccccatgctgcttctgatcgccgtctcttctgctccacacccctctttaggtctgaggcttcatgatcggcacgatttctcttgctctttcttttttaatactgaaaatttttggtcttaggtagcactgaagggagtatttataacacccagtacctgctgtgtcatctggaaagcatcatcctctgtgaccctccaggggtttgtgtcagacagtcatcatgttccctgtggcgcccgctgaggcgtcggggggtcagctctgtggccccgttttagcccagcaagtcgaggcttaagagtggcatagagactgcccaggccatgcggccagccttgatgctagatttgtgttttttatttatttatttatttatttttgagatggagtcttgccctgtcactcaggctggagtgcagtggcatgatctcagctcactgcaacctctgcctcctgggttcaagcgattctccagcctcagcctcccgagtagctgggattacaggcgcctgccaccatgtccagctaatttatgtatttgtagtagagacggggttttgccatattggtcaggctggtctcgaactcctgacctcaagtgatccacccacctcagcctcccaaagtgctgggattacagctgtgagccactgtgcctggtcctagattttttttttttttttttttttgagacagggtctctctgtgtcacccaggctggagtacagtagtgtggtctcggctcactgcagcctcgacatcgcaggctccggtgattctcctgcctcagcctcccgagtagctgggacttcaggtgccaccaccgtgcccatctaattcttttgtgtttttgtagagatcgtggaaatctgagtgtgacttggtagctctggggtgcagcctgcggtccccatgtctcaccggttccctggtggcgctcctgtgctgctccgggccagttctgtcaggggtggcagaggcctggatcgtgccctacgatgcgggccacaggggccgggtcacacagctgatgtggatgctgctgactggccctaggcctggctcacccccagctccctctgaagaccactgcctacctgctgtcctcactgtctgcctccgagaggacacacgtcctggcgtgtgctcattcactccctgctttctgtcagggtttgtggcgtgcctctgcctggtgctgtcgtggcacgcaccgcctcgctgtgctgcctgcctagtgcctggagggaggcttggccccgcttcctctgtctctgctgcccccgccctttgtgacaagctctgcactgtgtacgtgaacacaggacagatggagttcgggccctgccgtcgtccctgagtcccggccccaccgctcggctcctcctgctactgtgacccatgcaacccatcttgtctcctgggctttagcctctggggatgtccaaggagcagccctgagtaccgcatgtgttccccgctctcccatcactgcgagggcacggcccagccgagcgcagctcaagttcagcttcagaccttgctttgttcatacttaaagcacatccctccacgtacacctggatcggtgcaaagcctgcaggaggggccctgagacgctggccagcccggcttccagggtcgtgtttgctctgctcagtgagagggcctcttccctccacagataagcagggttctctcggctttggaatttaatttccaggtgttaatatatcgccctttcccattacctttctagactgacatttctattacatccattcaggaaagaatgtccactttgttatgggacaaagccatttgcacagttattagaaagccaaccttgtcacagacactgctgcactctccctccgagagggagctggacctggctgtggcagaaaaaaattccagggagaaaagcaattttaggaaatacggtgaaatcaaaacaatgcattttacccgtctccagtgtgaagatgatgaaggttgggttgtgggagcgtggaccgcctccaccagcccgagccctccacgtgcgcccgaccgccgtctctgcctcaggtgcgtggagtttggaggctgcgttacactggattcaggtcacccatctttactcttggctctttgaaaagaccacagtcctgtccccacccgcccatgggtgggactttctggacagttccaggtgaggctgtggaactcctggccctttcagggagatttgaggagatggccacagcactgtgttgggggaggtgggctgggagcagcagtgctcgtgggctctggccctggtgggagtgccctgtctgcgggcacccgggtgcagccctgacccctcccgccctgcctccctctgcagaagggtgctggtggcaggtgtgtcatcagaaaccccgatgagggcatttctggatggtgctgctgagataaggctgtctcctcgggtctccgtgttgagggtggctagaatcgggtgcccctggagcactgtggaagccaggtctactttcttttttgaggagtcatggcctgcgtccacttaatggtggcaaatcacacttggagagctcggtcacaggagcctactgaaacctgcagcccagaatgcagggcctgggtcacaggctccctggcttcacccaggggctgtccctggccctgtaccctgttggcctggggcacccccataacccgtgtccccaggccctggctggaacgtgctgtgcggggaagatgggccccacctctgcagcctcctctgcttccccgttgctttcctgccgcccgccagggccttggggccttcacacagcttctctccttcccggaacccagatcatccccggcgtccggctcatagcattgaggcaggcccttttctcccttgttcaccggcggctggcacagttccttgcatacagcaggctctgagtaaatgcctggtgaatattggactccttcacctacaggaggtgctgaggcctttggagtggccagggagcagctctcctgcctctgcctcacctgccctgtgctctgcccccgcccggaggactcttggtcccagcctcaccgtctgcatgggcctccgcggcccccaaactcaccggttttcaggaagggcctgctaccaggtagcagatcccgaggcttctgcttctgatgcctgagctaatgtcagcaatgtggaagagggtgttacttgctttcaactttcccaacaaccaaagtcgcaagacgtgtagctgtcagtggcagagcaggagggtaggcagtggctgggagcaggtgccagggcagggacggctcggccttcagatgcaggcactggaggcggcacccacccgttccctcctcaggctggtggaggagcctccgctgtcccgggacttggggcagctctcccttctggatttcctcctcccacatgtcctgctggggacacatggcttcctatctccccatggccccggaggtccagcgcctccctcccccatgctccaggctggggccccagctccctcccggttcctctgtctgttccgggcagcagtctgtggcgccagggccatgcccatgccagctgccgtagctgtgtcccagctgtttgctccaggtttattttgatggtgtacccctttataaaaactgtggaatttgcacactgatacgtgcatatttgtttaaaaaggataggtatgacctgcggccaataatgaacacacccatttatttgtaagatataaggacttataaacgtaagtagggtttccactgtatacctaggccccagggagctgtcaggtgccctccctgggcaccgtgcccgggccccagtgagtgtccagccccctccctgcctgctgtgcctgggccctagtgagctgtccggcgccctccctgcctgctgtgcctgggccctagtgagctgtccggcgccctcctgggtgctgttgcttgctgtctgttgggcattctgtctgtgtggtcttcctgaggctgttaccaactgtggtggcggcaggcctggggctcctactacgccgctgcctgtgctctgttgctcacatgaaggggccagggaagcctgttggcatatggagtcatgccatggctggctgtggcggggctgtggctgtgcgcgtggcgaggacgatagggttctgcccttgtccgtggtcaccctgctcctgctctcgcttctctgaggccagcccctcctctctgatgtgtgcggagcgtgggtcttggcctgccgggggctccttcgtggaatgcagggggtgcacaggtgttgactctgcatgaatggttgtctttccgcctggctgtttccctgcctgacgcccctgtaaacatccattcccaacacgcttcccagaggacgcttgcccttggagtactcctaacaaaagacttcccagtgaaatcagtttctggcaccccatgtggtatagcctgacacggcacctgctgctcagcttgtccatggctctgaggagccctcaggggccccaggcagctggtgggggatggggttggggggtggacagcaaggtgacctggcgggcgcagggcagctggtgggggtggtggggggtggaaagcaaggtgacccagtaggcacagcgcagctggtggggggttgggggaggtaggggacagcgaggtgacccggcaggcgcagggcagctggtgggggggtgggggaggtgggggacagcaaggtgacccggcggatgcagggaaggcccagtcttcatgtgcggtttcaatgtctcgttcctgggcttttctgcattaagtgtgagtttctaacataccacgttgaaacgtcttggatcttgcctgctgagccacgtggctcttcctgaaggacaaggtcagcgcccccctcgccaccacttcatccagatcccaggagccccttctgtcctgtaggccaaggctccacagcaccacgtgggttatggacgagaaacctggagtgtcctgctaggagagaggctgtggaattcccagtccccctcagctttggaggtttataccagagagaccgaggcttagagaggagcccagggaggctcctccagtgcccaggccaggcatcatccagctggcacaggtggctttagcccagcctcggggggacacaagcagggcctgcagggtgtctgggaagggctggagggaccaggcccggaaccttgtcctgcctacccaggctttggcctgacattgtccttgtttgtgctttaaaatcccctatcctgtttggtagagaaacatgctctctttaaactcagtttcgaagaaatccaaatctttgaataaccttgatcttgaaaggaaaggaagttagctgcaggtgaaaattgatggtcatgctcaaaggcatggttccctgccaaggaagcctcttgagtctttctactaaaaatagctgcagcatcctggtggtggtgtctgaaccctctctaggcccctcctggagacattcagagatgttaaaggtgacagccagcctcacctggccgttccgcacaggtgtgtttgctcctggcctgtgaggcacaggtgggtgggcctgctgaggactgagccgccctcgggggtactgggctgctccctccgcagcctctgccccttcagttgtccttggtgtcacggcacacccaagagccttgtaagttccctgcaccacagtctgggtgggtgcctgggtccctgtgtccatggtcctgggagaggtccctggcctcagtcagaaggtgtgaagtgtctggactttctccaggccggtgataggccactgttggcttgtggtctccatggttctgtgggtgcttcaacggagctgccagaaaggtcaagccacagcctgacaccagccagagtggaggcggcccaggaaccccctggctcaccaccctcagcctggtgcttccgtctgcccgtgtgggtgtggacatgggtctgaggcactggctaggggattccctgcttccagcaggcgcgtgaggttccatcctggtctctggtttctggtctggcctcatacctggcttagctctcgtaggagtgcaacaggtggaaggggcggtgatgcccgcagatgctgggtgaggtgccccgtgaacgtgtggtctggtgcccgcagacgctgggtgaggtgccccgtgaacgtgtggtctggtgcccgcagacgctgggtgaggtgccccatgaacgtgtggtctggtgcccgcagacgctgggtgaggtgccccgtgaacgtgtggtctggtgcccgcagacgctgggtgaggtgccccgtgaacgtgtggtctggtgtccgcagacgctgggtgaggtgccctgtgaacgtgtggtctggtgcccgcagacgttgggtgaggttccttgtgaacgtgtggtctggtgtccgcagatgttgggtgaggtgccctgtgaacgtgtggtctggtgcctgcagacgttgggtgaggtgccctgtgaacgtgtggtctggtgcccgcagatggtgccagcagatgttggatgaggtgccctgtgaacctgtggtctggtgcctgcagacattggatgaggtgccctgggaattacagtgctcgatagtcctcctggacactggtgctgatgaagcgagtctggccacccacgccaggcagtgcccagtgccccttgggtggctcctgccctccagcaagacatggggatgctgctggacccaggtgtctgtgaggtccaggcacagatcttgcttctgcaggaggcccctgggcggactaggtgagtccttcctcctaccgcctctttgaaaatctgtgtgtgtttaaactaaatttcttgagtgccatcagaaggcccgtgagctggtgagctgcccccgagccttttgccacccatggtgggcatgagccacctactgagtcggctccgagtcagcagaggccatggagtgggggcccccactgtgcagggagagggtctgaccctgggcggggcaccgggaagggaggtggaggcctgaggccagccctgctggaattcctctcttctagggggaggaagcctaggagctggaatcagaaaacctgttagaacctgagctctgtcactctctcacttgtgcctggcgccagctccctttccctctctttgcctttgcttcctctctggaagaatgaagcatgcacgcctcaccccatctgcacggggagccgattcacagattacatgagggaatgctttgaaaatatttttaaattgtaatgttcaaatatatgtgtgaggtagttcatcatcaactcactcaacaaacatatggttagttctattctaaggtgatgtgtgttcctaaaagtcaccctgctacacaaaatcacattaaaaataagatgggaccctgatgaaaatggcagcatggttgacgcggtcagtggctggacacaggcaagtgtgacaatcggcacagctcttcgcctcgagaaggcctggcgctggcttggggaagtgggagtggtggcttgtgagtcactgtggagtggggagagcacctgaagctggaggggtgtggcacagggggctcagccaggctcgggaggctcccatcacagctccgttcagctgagtgcggttttctgcattcgtcttggaggaggttcttcacagaggggcggagggggactttttggccatcactcaacatcctatgggacagccccttcctggctgacccacctgcctgccctgtgccaggccttatgcagtgtggttgatgcttattaccattcatcaaatttatttcctgacaaatcctatgttaaatacctggcatgggacctgcagtgagtgggcattcgatgtatagcggtcactgctggcattcgtcagagtaacttctcatttcattaacatccctctaatcatctcacttaaaactcacttggagaattctgagctcagatttggaaatcccgtgtttgtgcaacaggaatttgtcgttggatgagatgaaggaacttgcctgggtgaacaggcaggattcgcagcccaggtagctgctcattctccgagtccctctacacctaccccgctgcccgactagggtgctggagcatggtgtctgagagcacgcgtgtgcgtcagtgtgcacatgcgtgcacccgggtgttcatgaacacacccgtgtcggtgctcagtgtgcatgcatgcacacatgagcattactgtgtgcgtgtctgtgctgcatgagctctgtgtaggagacgtgtgtgcatatctgtgttgagtgctgtgtatgtgtgtgtccatacgtgtgtacttgtgtgcgcatgtatgttgtgctgtgtgagttctgtgtgcacatgtgatcatgtgagtgtgcacgtgtgctttgtgagctgtgcatgcacatctgtgtgaactgtgcattgagcatgagtgtgcatgtatctgtactggtgagctgtgtgcacgtgagtgcacgtgtgtgattgtgcatgtgtctgtggagtcagctctctgcatatgtgagtgcacgtgtgtgagtgtgcatgtgtctgcagaggcagctctctgtatgcatgtgagtgtgcatgtctgtgctgtgtgagctctgtgtgtgcatgtgtctgagcatgcacatgtgtgagtgctgtgtgcgcacatgtgtgtgcatctgtgcttaccattctggaacactggttcttttatgcattttggcttcttttcccacgagaccctcatggaacattaagcccagcagacaaggccagccccaaccattgtgatagttattaaacagcaataaagcaggatctgtatttacagacccagagtgtgctcagactgggaggtattaaacatcatccatcatcaaatggaaaacagtcagatgcagggagtgtagaatggagttaatattcttttggttaacttcacccataaagagctaaactgcccccaataaaacaccaaggggaggaagggaggttcttccagacggaagcaatcatcggcacggtctgcagacaggcccccagggtttcctcgtgccggtgggttttctgcagcttgttacgcagctgcggctcagagcaagcggtgtctcagggtccctttccacagttctcattgcctgctttgccttaggtcagctcatcagcagccctggggagctggggtgaacggaggaaagacattgacttgtagaacctgagaatctgggaagggagggccttagccgaagactgtttgcccaggagggtggcacgcagtaaacagttcaacccaggagttcaacccgggagctggcattggggcatggatgtgcgcgctggtggccattcattactgatcctccagtttcctttgtcgtctgtgagtgggtgcgctcagcccagggggtgttgtgtgcgcagcgtgtggtgcagaggtagcacctgggacagggggccgggcactgtgcgtgtgggcacagggagcgctgctcctcctccttagacctgaggctcctgtctgggcaaggtctagccctccacctaggagcttacggaatcttcagtggggacagatggtctggaaaggactcacctcttttcccacccttggttgaatgtggccccttgggcacaggcgggcagcgctcacccctttcctacactaagacgtcctcacggcttagtgtagggcaggcgggtgaggcggggtttgtgtcgcttctgatctggaaggggtttagcagctgaggagatgatcgccacgcagagttccgtctccagaaaaataagaggatttgcacagttcttgaacttcacccttccaaagttttcacctcttgtagactagaagttttaagtgagcttctgtgtgtcgaaatcatttcatgggcagtgccccagccggagcctgtctggaggggagggttgggtgggcacgggcgccgggcctgggaggaggaggacaacatgggtttcctagctcgctggacggccctgaggttgtgggggcctttggtggctgaaaggggtcttgtatttctgtgcacattgaaaggcgatcttatttgcctgcgctgccgtccagctgaggacagggacatagggtgcctgtgagtgcaggcctggaaagggatgggactcccctctgtagggagggcggggcttcagtccacctggggcgtggggcctgcgccaccacccgcatcccaggagaggcactgattgcagggctcggcctggggcttacatgggaccctccttgactccctagaggcagccgaggtggccactgcagcactcagctggtcttccccaggaagtccttcccttacagggcctccactgccgcctctgtcatgggcaggccctcagggagcagggctgtggcggcctgtggtgcaggggacgtgtgccatgtctcctaaagatgatggctcagctccatggggggccctcggcagaacgtttggatttaaggactacttggggctcaccatgtgctccgaggcttagggaaggcctgggacgggccctgaagtgctgtctggctgaggctgggctcctcaggtgagaaattggctcccatgtcccgctcccctcccccaccccactctccttccttcaaggaatcctgttagacttttcactttgctccacggcctccaaatcccactaagcgactgtcgcttttccagggcatcgtcaggtgctgtactaagctttaataaagggctttatccacagcttcagaaaagtctctaaataaattagatccactggttagcctccaacggtgatttttattaacctccagttaaagaaatattgctggttacagaagcacaatttatttctgtgtaagccaggctggtgtgaccctgcgggctcccgagagggatagtgctatgtacacgcagagtgctgggctggccatgagaggcacctgagagggcacccggcagcctgagggctgggagtcactctcacagggacacagagactctcacagggacatgggggactctcatagggacgtggggtatctcacggggacacagggatacgaggactctcacagggatacgggggctctcacagggatacaggggactcttacagggattcacagccactgagacacgggctggtgctcctggcctggagcagagaggggtgtggaggccgggtgggaggccggagcctttcatgtcctttctggcccctggtggcagcagctcccttgctgaatggcttcaccctgggaggtgatcagaggccggggcttgccgtcagggcgccctggctcagatcgtgcctctgcggccgtgtggcttgggcgtgtggcccctgtcagagcctctgcttcctctgtgaagtgcggagaatggttgctgctgctcatcagagtggggaggtgacaggcctggcccggggctcgggttttgttcatgctgttgcctcccctgggctcccctgtctacaccactggcacaggagctgagagggtgtccacgccccgggggactacgccatactgatggcctccatttcttggggtctgtctcactgagctgggactccagttccagttcttgtcatcctcactgaatctcacaaagctgagcgggaaacacgtgggctgtgctgagtcgccctcgctgtacaggaagagaaaccgaggctggagcagtggagaggcttgtgtggtcgatcgcctggggacttcatgtgtactcaggacccagacctcccggccgcacccccgtgctggttctgtgccctgctgaaccatttgggaaattgtgttatcatctcacacatgctgcgggctcctctgggattcactgctgctgtttctaaagcactgttcccagtgtgttcacagcgtccccaccttcttccacgtgcgccgggcagcttctctttggcctctcacacctgaggtgctttgtggcaggagcgtcctctcaggagcctgggtgcgtgagttcaaatcctggtcccaggtgctggctgtgtggaacccagccgaagtcattcgtctgtgtctcagtttcgttgctggagagagcggagattgtcccagcgtgtcctcacagtgttgttggcggactgaacaagttgggaggaatgagcaagagtgacccttggatcaggacctgtagtagctgcctctgtcctgtgagcattcgctatgatttttattccagaccgttggctgctccccttcctgcggcgcattgtggccgccagctctaggcagctcgtcctcccatgctgctgtctcccctcctctctccatcaggcctttgctgtggttgctggagcattgctgccgccgtccattgcgtgtgctctcttgacgggacgggcacccatctgtgcttgagtcacgtccgagcccgcggccgccacccacaccctgttcctgcacggtgaggtctgccacgttccaggggcaggctttgcccggccctccctggccctgttcagtagccctgggcccagcttatgtctatgttgggcagtgcggggtgttgggaggagagaatgggcagaggcccctgcctcagggctccctggggcctggcaggaggcctggggtggtgctgcccccactctcgagaaaaaggctggcactccgcagggctgtttgtggtgggaaacaggcgctcagccagtctggatccccagcccccccaggccctccgcgtgcctccactctgcagggcacccgtagcctccagagaacagtcatgacccagcgtccttgtaggcacggtacccgggcatcacgttcccaagcccgcccattccggccacctccagcccacaggatgtgccaggtcgtgccgagggcctcctaaggagcgtgggattgtcagaacagattgcagcatggatttttggaggattaaagttaattaaagagctcttccttgctttcacgtccttgtgtctgccagctatttacatgctaatgctgccctgacaccgaggatgaggggtgtctgccgcactgcactgcgctgtcaggaggggaaccacaggagaaggaggggagcgcagtgctatgtattaccctgtgcccctccgatgggacaggggcgtggatgcagacacattcgaaagtcagtggcagggtcgttttcttgtatttcctgaagtgtcttcgtggctgacttggatgttctccattcaggcccccccttacactgcataattgaatgcattctgcgtggaaatatcttcgcataagcaattttataaataaagagattgtggagagtagggtctgaagtttctaagtgcagggctgtgttttccagaagcccatccttcttggcgaaggtgactttcagcttcacggggtcggcctgtggcagcgtcctctggccctcagcagcactgccttgatgtggacgtggacgtggatgtggacgtggacgtggacatgtgtgtgcgtgaaggctcctcaggtgtattagtccgttcttgtgtctctataaaggaatccctgaggctgggtcattctgcggactgtacaggaagcacagcgccggcatctgcttctgctgaggcaccaggaagcttctgatcatggcagaaggcaaggagcaggcacgtcacatggcaagagcaggagcaagagagacacttgaggttccagaatctttccaacaacactcctcactcgggatggctctgggccattcgtgagggatccgccctcataatccaacacctcccaccaggccccacctccacctttgggaaacatttttcaacctgagatttggagggagcagacatccaaaccatatcgccaagtatttgttgaatgaataaatgaacgttgataccatcattgggtgtattttagctgcagattctaaacgccagggttctggggtggctggagtgtgaaaaggtcggtggtggcagttaggaatgccgtgtgcatgcccttgtgcctgtgtgcccatgtgtgtgtctgtgcgtgtgtccgtgtgcctgtgtgtctgtgcacatctgcgtgtgtctgtgtccatgtgcgcgtgtgtgtgcatgtgcgtatgtgtgtctgtgtacgtgtgcgcatgcgcttgtgtgtgcacgtctgtgtgcgtgtctgtgtccatgtgcgtgtgtgtgtgcatgtgtatgtgtgtacatatgtgtgtgcatgtctgcatgtccgtgtgcatgtgtgtctgcgtgtgtgtgtgcacatgtgcgtgtgtggatgtgtgtgtacatatgtgtgtacgtgcatctgtgtgtctgtgtgcatgtccgtgtgcgtgtgtgtgtctaagtctttcttggatggtcccttgctgctttcccagggagctagttctctctggccttggctgggtaggatgcaggctctgctcgcctctctggaacagagcaggaggtgctgcggggagctgggtgcagcgtggccaggccaaagcaggcacctgagtgagttttgtgttcagtatccctcccccctgtgggctgccatggtgagagttgacatttttgcagcgtggaagtgagactgtcttgtggagttttctactcctctcgggcaaagagagggttagtgacctgacacctgatggtatgccttcaaagctcttcctcatctggtttcattcaactcatgtcaagcgtcagtcgtgacccatgtcaaaggtatatgcagctggatgtaagttaaagtggagaaaacagattttattcagtcgctgctgacagcaggggacagagctgagctcctttcaggtttgtgcagatgtgactgggcattttaaagggagtgtggggaacaggtgcccaaatggagtcagggaagtgaaaaattacagaaagcagcaagagggttgggtagcatgaatgtgatgagctgactctgctacgagctggcaggttggggctggcagggatgggctcctgctccccttccccagccccagactaggagacaggcctgttttcctgatgattacgttccaaagggttggctctcggtccttgagaaggacatcccagagctgtaggaggtgcgggcatgtgtgtctccaagggactgaggaaggattcacagttgtcagctcggattttctgaagtaactgtgctaggaaggggaggcagggcaggggcctgttgtcaggtgtggtagaaccaagggcaaatcctcctgacagccttgagctttttccgacaggaactctgggggtgctgtagctcaggcttcaggaagtcctgctgtggtgggcggtgtctcagtgcagggggtaggatggagcccttgtgtgctgagagctcttctgtggttctcagcagccaacagtgagagacacacgtgattgtgaagccaggcttctcagggcagcccctatgacggcacacatcacgtagaaggtttaaatcagcattggctgaatgagcgattccaaagagcagccaacacctctgtttgcaggaagatggagttgacgcattttctttgatccttctgttaagtataatgaagagtcctggacattatctatggaatgagcatagtgagcctctgcgggatggaggccaggggccttgggcctcggaacagcctggcggggagctgcccaggtttcctcgtctgcctctttcatcccagacttggagctaaggaagcacatccccaaaatgccgacgctccccagcaaaggactaggtaaatagcagctgggaagacagaaaatgtagttaatgcctagcaataatggaaagaaaaacttaatggatataaggtcagcagcagaatggaggcgacaggagcgcgttcgtgaactcagagatggaccgataggaactgcccatctgcccattctgaacagcagagagaatacgatggaataaaatgagcaaagttcccgacaccgatgagacctgggaatacgatggaataaaaggaacaaagtccccggtgccggtggggccacaacacaagatccagcattccagttgtggggatctgggagggtccggaggagctgagatggagccgcagaggcagcaggcagcgtcttcaaaactaatccagtgtctttgctgttctgtgggtctactcaggttgtctgtgtttctcttgagtcagttttggtagcttttgtcttttcaggagtttgttcatttcacctccgttattaattttcggcatgcagctgttcgtagtattcctttacagcctttatctctggaaggtcagctagtgtctctttcactcccaactgcagtgatctgcaccctctttcttgtttccttggttggcccagctaaaagtttctgtcaattctgttgctattctcacagaaccaactttaggcttgaccgatttcttttattgtttttgtgttctttatttcacttatttttgctctaatatttattatttcgttccttctgcttgggtcaactgaagttggactccatcaagattaaaatttttgccccgtgaaagttcctgtgaagagatgaaaagacaaggtagagataaagaggaactatttgcaagcttcatatctgacaaagacgatttgttatctgtaatagatgagaaaactctcaaaactcagtaatagaaaaacaaaacagacacacctaattagcaaacaagcaaaagatatagacagacctttttaccaaataacatatacagatgacagttaagcccgtggaaagatgttcaacatcattagtcatgagggaaatgcaagttaaaaccacagtgaggtgtcactgcacacctgtcaaagttcagaaacggacaccatcagatgccagtcagtgtgtagagaaactccatctctggtgccttgctgatgggagagtgacagggtgcagccaccctggaaccagctcgagggtttcttaaaaactgcactgcagctcccatatgaccagcagtcgcattcctgggtgtcgattccagtgaaataaaaccgaggttcggacaaaacccgacagaggactcttcctagcagcttttgcataatggccaaaaactggaaagaattctgatgtccttcggtggtgatggttaaacaacggtagtgcctccgtcacacagagtaatactcaggactaagaaggaattcactgtggataaacatacttgaatagatctccagggagtttagcggagcgaagagcccagtccctgaaggtcgtgtgctgcatgatcccatttgcatgacgttattaaaaggctgaagtgatagacagcctgtggatggctgccgtgagttacggagacgcacaggaggaatcgtggctgtgaacggacaacccgaggggtttttgtggtgatgaaatgtgctgtatcttgactgtatcattgtcggcatacgggttgtgatactgtgctgtagttgtgccagatgttgctattgggaggaactggatgaatgctacttgtgatctctgtattattttttatagctccaagtgaatctgtaattggatcaaaataaaaagcttagatcaggcacagtagctgatgcatggaatcccagcactttgagaggtcgaggtgggcggatcacttgaggtcagcaggagttcgagaccatcctggccagcatggtgaaaccctgtctctactaaaaatacaaaaaattagtgaggcgtggtggcacacacttgtaatcccggctacttgggaggctgaggcaggagaattgcttgaacccagaaggcggaggttgcagtgagccaagattgtgccaccgtgctccagcctgggtgacagaatgagtgagactgtgtctcaaaaaaaaaaaaaaaaaaaaaaaaaaagtcatcagcttcattatctcctaacagcatcagcttgtcctctgaaactttgaaggcagggatcgacttctcctctgtaactgtaaaagccctagacggcatcttccagcagaaggctgttttatgtgcactgcaaatctggtgtttagtgtggccaccttcattggtgctcttagctggatcttctggagaacttgctgcagcttctccgtcagcacttgcggcttcaccttgtacttttatgtgatggggactgcctcttaatgtaaacctcatgaacccacctctgctagcttcagacttgaattctgcagctttcccacctctctcagcctcgtggaacttgctctgacttaagggaatgttggggctggtttgatctatccagaccactcagacttctccgtatcagcaataagacagtttcactttcttatcgttggtgtgttcagtggagcagcacttttaatttcctccaagaactttccctttgcattcacaacttggcgagctgtttggcacgagaggcctggctttcggcttatctttgcttttggcacgccttcctcactaagcttaatcctttctagcttttggtttaaaggagagacatgcgactcttcctttctcttgaatgcttagaggctgttgtagggttattaattggcctgattttaatactgttgtgtcgcccagggaatagagaggcccaaggagagggagggagggagatggctggtcagtgaagcagccagacacaagcagcgttggtcggtgaagcttttgccgtctgaggagcatagtgtgtggcgtcccagaatcaatgacagcagtaagatcggagaccgccgatcacagaccacaacagacataacagtgatgcaatgtcggaagtacagtcaggacgtggcgccccagaatcaatgacagtagtaagatcagagaccacccattacagaccacaacagatataatagtgatacaatgtctgaaacgccatgaggattaccagatgtgacagagccgtgtagggagcacatgctgttgggaacatggtgcctcgccgaaggcaggacggccacaagccttccatttgtaagaagcacagtatctgtgtagtccaggagagcaaggcgtgcctgggtccatgctggctccttattgtggccagcacactgtgctcgtgtaagatgttaacagtggggcacctgggtgtggaatatgtgaaaagtctctaccatcttctccattcttctaaatctaaacccgttctaaaaaaaaaaaaaaaaaagaagagtctattaagaagacaaagaaggagccgaaatttccacgtggcagaaggcactggaaccggtgagatctgatgtgtacctgggcctgatccacgtttgctgcatggctggacaccttcgtgggcgcgtggaagctcatgctgtggggggagctgtgggaggagcatgcggcaggtggaggtcttctgcgcgtgggtgggcacgcggaagctcgtgctgtggggggagctgtgggaggagtgctggaggagccctgggaggagtgttcaggaggcggagcgtgcctcgtgcgcgttggtgggtatgagtggcgttggtgggatctagctgaccacctcccacctggttggtctgcatctgtagacagcttagttcttaggattctaggtacccagtgtcatttccgacacctgcttgggctccctgtactgccagggctgttgagtctttacagcacctctgatcaggagccctggccttggggaggtgggacaggcacacgtctgggttgctgggttgcctttaggggtaagctcttccttttgtcttctgttcaaaagagggcccacagtggattcaggcctctgatttaccactgcctggagcttggggaatgctctccagtgacaacctgggcttccgtgggatttaattttgatatattggcctttgtgtgtaggaagagtccaaactcacgaccggatggattgtcctcctcagactagacacttcatccagagaggactctgagccaaccctaagggattcaggctggagctctggttccccgcacggaggtggcgcaggaatgcatcgtcctcccctgtcctgacttgtcagcgctcctgcgctcatgcctgggagcctggaccccagctctgtcccgacttgtcagtgctcccgcgctcatgcctgggagcctggaccccagctctgtcccgacttgtcagtgctcccgcgctcatgcctgggagcctggaccccagctctgtcccgacttgtcagtgctcccgcgctcatgcctgggagcctggaccccagctctgtccccacttgtcagtgctcccgcgctcatgcctgggagcctggaccccagctctgtcccgacttgtcagtgctcccgcgctcatgcctgggagcctggaccccagctctgtcccgacttgtcagtgctcccgcgctcatgcctgggagcctggaccccagctctgtcccgacttgtcagtgctcccgcgctcatgcctgggagcctggaccccagctctgtcccgacttgtcagtgctcccgcgctcatgcctgggagcctggaccccagctctgtcccgacttgtcagtgctcccgcgctcatgcctgggagcctggaccccagctctgtcccgacttgtcagtgctcccgcgctcatgcctgggagcctggaccccagctctgtcccgacttgtcagtgctcccgcgctcatgcctgggagcctggaccccagctctgtcccgacttgtcagtgctcccgcgctcatgcctgggagcctggaccccagctctgtccccacttgtcagtgctcccgcgctcatgcctgggagcctggaccccagctctgtcccgacttgtcagtgctcccgcgctcatgcctgggagcctggaccccagctctgtcccgacttgtcagtgctcccgcgctcatgcctgggagcctggaccccagctctgtcccgacttgtcagtgctcctgcgctcatgcctgggagcctggaccccagctctgtcccgacttgtcagtgctcccgcgctcatgcctgggagcctggaccccagctctgtcccgacttgtcagtgctcccgcgctcatgcctgggagcctggaccccagctctgtcccgacttgtcagtgctcctgcgctcatgcctgggagcctggaccccagctctgtcccgacttgtcagcgctcccgcgctcatgcctgggagcctggactccggtttacatttctcagcgtgtccttgggctgtgtgtggtctgcgtgtccctggggttgtctgtggggtcatgtggcccctctgggctgcctggtttccttttctcccacatcgtgtctggcatttctttattcagaaatgaggcatctgttgttggcttccctgtggagtttgtgtccctccctgagctcccgcctctgtggggccagccccagtgtggacttgtggccccctgtgctgctgggcctcaggtttgggtctgcggagtacatgggtgtgagtgctctgaccactggactcttaaaacatgcagccctctttgactgtgacactggacatgtgcaaagcttggggactgatcaaaaagtataaagaggccattgaaaaagaccttgactcctgcacccagaggtagcaccaagaacatggcatgcatttcatctccacgtctcccttctctcctttcctcccctgttcattcattcagccaatctatcagccaaccagtaagcactcacggacacccacgtgcgcaggtgccatggaggcagccgagtgtggggactgctgtggcagagctggcagccttgtgtgcttcctgcacttgtgacattttattgcagccagtgcctgtgccattaagcattccttgaaaataaaatcttttttggctgtacgatgtttcttcgtgtagacataccaaaagtaaactcttggccggctgcggtggctcatgcctgtaatcctagcactttgggaggctgagacgggtggattgcctgagctcaggagttcggaccagcctgggcaacacggtgaaaccccgtctctactaaaatacaaaaaattagctgggcgtggtggtgtgtgcctgtagtcccacctactcaggaggctgaggcaggagaatcgcttgaacccgggagacaaaggttgctgtgagcctagatcacaccattgcactccagcctgggcgacagcgagactccgtctccaaaaaaaaaaaaaaggagactctttattggaaatttagctttgtttttaattttttcatgattattgctaatgtgtgcaacatccttggactcagtgctttccccatatctgattcatttgttatttatttatttgtttagacacagggtcttgctctgtcgcccaggctgcaatgtggtggcgccatcttggctcactgcagtcttgaactccagggctcaatatatcctcctgcctgagcctccccagtagctgggactataggtgcatgccgccccgcctggctaattaaaaaaaaattttttttgtagagatggggtctcactatgttgcccaggctggtctcaggtgattctcctgcctcggcctctcacagtgctgggattgcaggtgtgagccaccgcagtctgattactttttaggcaattgttactgagtggaagggtgtgaacaccttcaggacccttggccagttttgctgactcgttttccagaagcgcccgtgactgctgtcccagcaggtgtagcgtgcagccctcatggcctcactcgtgctgagtgttagcattttacttcttgccactccaggtgaggaacgggtcttaatgaattttgtgtttgtcagttacgtttcttctgttgattgttgatttttcccagttttctattaccgtgttagtgattttcctattgatttgtaaaaggttttcatgtatttgtggcacgttttccccagtttgtcttttaccttttgtgtttttaagtggcgttttgggacccacggaggtgttggtgtggcgaagcgtgctggtctttctctgtcattccttccactgcttcggggcccacagcctttcagggccttgctccatggagtatccatcttgtttcctttagttctagtgcagtgaagcaggcgagggcaggggtgaccgggtcatctgggctggttcaaactggggctccgcacccaggtgttctgtgcccccggggtgcgttactcacacctgcagcacccgggctgtctctgtgagaatgggatgatcgaagggcccacctcctggccagcacagggcctggcacgtggtgcctggctggcgagtgtatgagtggggtgctgggctgggagcgtgagctctcggagttctgcgtctgtttatcatggccagtcagtggcagcgtcagctgggtgtcctcagcccacgctgctgtaccccaagaaggcagtagacacgtgataccagtgggctgggggcgtcttctcagctggtgccctctccacgtccttctgcgggggcgccttgcccccctgccccatgcacactctccctgtgtgcagagtgggtcttccttcctggtgtggggctccctgagtgccctgcctgtcctcgcctgttcttacagtgctcacgtctgcctccctctccaggctgagttctgggagagcaggccggcgccacccccctcaccacttgctaggagctggcctgaccctggtgggagcccacagccctgggcgcgaattcaaaatgccagaagcagcacagggtccctcgagcctggtgggaggtacttcccatgggcgagtcatcttgttttgaattctcctcatgctgatttctggccccactcagcccagcacagctctgaaggagacgaaggcaaggccagctctccccagctgagatgagctttcagttgaggaaggaccctgatgtcagagctgtttgggtaatggcctgcccctggccatggatgtgcaccaaatcttttcaggactcgtggggtcactgctgcccgggggctttaggtagctattagagcccagggctgggcaagcgctttcccacctgcccgttagcatgatggccaagagcccaggctcggcttcacggaggctggagacctggggcgcgcgccttcccctggagccttgtcctcatctgaaagggaggactccagcctgcctcaggaggtggttccgaggactgattggctgatggtttcactcgttcattttttaattgaacacacagttcctgagcacctgttctgttccaggcactggacagggactggggccgggcgtcccgcatgaatgaggggtcagggagctgatgcatggaaactccttggcacaaggcccggagtgtgcctggcaccctgggcactggctgcctgcctgttacccgtcggtggagaaagccacctagactttgcagcactgtaagatttttgaactgtagaagaccaagtccatctaattccctgttttgctgataggaacgctggaggcctagagaggaaaggaacccgtctgactgctcaggctgagtagtggccccagagccgtgactccactgtgctgtctgtttcccacgttgccctgctctcctttctccctgtcctgtcaaataaactgcactcaaaatagagccatgcggcacagggcctgtctcaggcccatggccccatatccgcgtgggtcaggcatgctggcgagaccttgcgagggtcacgtcctcctccctggtgaggggccgtctgcagccactgtggcttgggtatggcttcctgtcaggatggtcccagtgccctcccagatgtgcacggcacccacgtcgtcatagcgcaggtgtgagcagctgctgtaacaaggctggtgctggttcaggtggatgctggggaatgcatttatacagcgaacacaaatgaagtggaatttgtcatagagcagtgtgaaatgtaagtaaaattgcctcgggaaatcataattgattccactccttcctacaataggtgttgtagagctttttatcagaggttgaaattgtaaaaaccaggcttgctggtggggagcccagaacagccccttttccccctcccccacagctacacgtgggtggtggaggccagtggggagggtgtgacggcaggaagccagaggaggagctggctgagggtaaccccaagacagctgtggggcagggaagggagcgtgctctgtgtgcctggtgcagctgcaggcagaggggtgagtagtgggagaggaccccgtgcctcctctctgagcggcctggtgttcagcctcctgctgccttcaggagagctcgcgtaggtgcagttcatggagaatgcacagctggctgctggagggaggatgctgctgaaggctggggaccgttttttctcctgggggctcctccgaatccagtcgcccagcagaaatagagctttgtcaacagtaaaccgggtttattggtcagataagataaccttgtaatgagacttgtggaacttgaggcaaaaatgaggaagaacagagaggatggaatgggaacaagggagagacatggtatcatcaagctctgagcaaggttggccgagagcaccaggcgcaggttgggggctgaggaggacagaaacgcgtctgacagcagggcgcctcccacggggccccggaaaccctcgctgacccacagtattgcccttcaaaacctggtcattggtgcccattacagagaaccctttcatcgggaaaagagaccgtttctcctcattctcagtttcctctgccggggcggcgtctggtttgttttggaggcattttcgtcaagcgcagatgggcaggttccactcctgcggggtccggccacctgtcactggcgccctggcttacccaggggcctctgcacatcaaggctgttcaggggcccgcgtgtaacaggctctaattagcgtaagcaagtgaattagccttatctgttcatgaaagaagtgaagcaagaaatgcatttggtgacactttgtcagtgctttgttcgagctgctatacggaaattattaatagtagaattgcattctgttacaatcgccctctaattcagtcaccatccattgaactggactttttacccagttagcaaggtaatgagtttggatgactctgaaaactttgtgacctccaccccgggcgtcactgtgggctgggggaacctcctcaggctgtgtgtggaccttccgtggagcgcggggcggggcgtagcggacatgcacctgtacacagctctgggttccgcgtttctggggcactctctgccagccaggggtgccctgcagaaatgaggctaggattacacggggagcagcttgggccaaagactcgatttccatctgctccctgaatgtggtgagcccggtgtccacaggactgtgtaggaggggacagccagcatctgccctttccagagacctttctcctggcactcgtgtctgggcgctagggatgatcttgtttctgttccttggatttttacttctcttcagctccatctgaagcttttcccctctctcatttcattgtaatcataactcgcacatcaacctcaaattaccctctatcaatcactctcttgcctagaaacttgctgggctcctcctcttctgctgccctgggtgtgtcatgcagagtgccctgcgcctgccaccaactcccaccgcccttgctctcccactgccagaaagttaggcctccaggcctctggagtccgagttgggctcacggttccatctgagtgtgtttgccctgagctgtttgtaaatgggacttacaaccacagccaagctcttcaaattatggagttccgtttaaaaaaaaaaattactgccttttaatctttttattagagcataacagacatacagaaagtgctttgtcctgagagtacatcttagagggctatgatgaaatcagtccatccatgtctcagctccacggtcgggaacacggtgtcaccagggctcccaagttcacctgccggctcctccacctcccccaaagccctgccttcccgattctcacacgccagttctgcccatttaaaaatgttgtgaaatggagccatgcagcgtgtaatctttcgtgtttggtttctgttgctgtgttatttcatttctatcttatgggtatatcacgtcataatttttaaaattttctgtgaatgggcgtttgaatttctttatttcttggctactgtgactaacactacagaatgggagattatatcatcttttgttaggtatttgtatttcaaatgtctcctctcattctgtagcagcttttcacactctaaacagaaattcttaatttgaatgaaatctaatttatcaatctttacctccctttgtggttgtgatttgtgtgtgtcctgtttaagaaagcttcgccaccctccaggttgttccagggtttcactcctgtcttcttggtggctttgcttcttcacactgaccgtggcactgcgcagccttgttgccctgcgcagccttgttgcactgtgtgaagccttattttttttttcatttttcttgtcaacgtgggtatccagtggactcagcactccttactgcaaagctgctccttccgcctgtgccacagtgctggttacaccttcacgtgaggtggctctgtctgtattggctgtttctggaatctgtattgtttcgttggtgtgttcatctctttttggcaaaaccacaagtttcaattcctgagaatgttagagtctcgttacctgatagggtggccctctctgcttgtctgcatcagggctgccctggctctacctggccatccgcctcttcacgtagattttacagctcaacctgtcagtctcaccagtggacttgctagagtttttattgagaatgcattgattaaatgacatctgcacaatattgaatcttctaatccatggacgtactatatgctaacatgtgtttaggtcatacttttttttttttttttttttgagatggagtcttgctctgtcgcccaggctggagtgcaatggcatgatctcggctcactgcaagctctgcctcctgggttcgcgccattctcttgcctcagcctcccgagtagctgggactacaggcgcccaccaccacgcccggctaattttttgtatttttagtggagacggggtttcgccgtgttagccaggatggtctcgatctcctgacctcgtaatccgcctgcctcggcctcccaaagtgctgggattacaggcgtgagtcaccgcgcccggccttaggtcatacttattttctctcgaaattgtttcataatgttttctgggtggacatatcatgggttttgttgttttgaataataatgtttgtgctttgaataataatgtagaaatctaattggactttgattattaactttggtcctgcagcattgctaaatctacttattttaataatttatttgtagattatattgacttttctatgttcataattgagtgatttaataatagctttcattgtcttcttgatcttcgtacctttcatgcctcttcttatctgtggcttagcatagccagtgctgctttggacagacatgctgatagctggtgtttgttttgcatcatcagaagaaaagctttcaacatttcactgttaaagatcgtgctgacgactttagtaaggaaatccttttcagattaaagttctccctattcctcatttgccaagagggttttgcttttgttttgtttcatagtttttatcgtgaatagatgttgaattttaatcaaatgccttttctgcaaatattgagatgatcatttgattttcttctatattttgttaatgcgcattaaattaattgattttcaaatgttaaaccaaacttacattccaggaataaatgagcatggcctatgggttatgctctgtgtgtaatgctttatttggtttgccagtacgttaattagggattttgcatctgcatttattggggagaaaggtcattacttttcatttctcagaatgtcgttttcaggttgtgatgttatggcttttctggccttagaaaatattagcaagttgtcttctgttgttttctgtaatcgttttataaggttggtgatatttcttctttaaccgcttggtggagtgtaccagtgaaagcatctgggcctaggggtttcttgtttacaagattttaaatttgggcttgatttattttaatagctttgaaacatcagattttctttttttttctttattcagttgtggtaaaagttagtttttaacttttaaaacttcattttatcaaaactttaaaattcatttgtgtaaagttgtttattgtcatgtttttaatatttttgtgatctctagttatgtctttttcaatattgttatttgcttattctttgtaatctgtctcatcaagagtttatcaattttattagtcatttggaggaaccatcttttggctttattgattttttcccatatgtattttatttcattaatttgttactttctttgagtctaatttgatgttattctaacttttgagttgtatatgtagataattgatatttatcctttcttgtgttacagtatatgcatttaaggttgtcaatttagttgcataccgtacgttttgatgtgttgtattttccttatcattgggctcaagtcatttatcaatttccattgtgatttttattttgaccaatgggctattcagaaacaaatttctcaaattcccaacatctggtgattttcaggtatcttcttattgatttctagcattatctccctgtgctcagagactatcctctgaatgaccccagtcccataaaacttaccaagaaatgctctatggccccatcggaagtcagttttgtaaatggcccatacacacttgaaaatagtatgtattctgcaattgttgagtgcagtgttttgtaaatagctacatatcatttgttaatcttattcttcacatttctttaatgatgttttttctcagctcctgcaagagttgtgttgaaatttcccattatgattgtgagttttgtctatttcttcttttaattttgtcaattattgcagtatgtctttggatgctgttttattaggcacatataaattgtgaattatcttcctggtgaattttgccttttgttattatgagacattctttatctctgcggattgttttgatttttaaatctcctttctgggatattaatacgggtatgtcagcttccagtgtttaatagcattggcaccttttactttttcacttttcattttgagcattgttaaattgtttcattataaatgtagtatactataaatatataagtatttatattcagcgtaaaaatcatttcttagtcgaaatatttaatctaattgtaactgatgtaattaatgatacatttgcattgaaattaaccatcttaatagttgcctttagtttttattcgttttttatgaaaacatcttaatcgtagaataaatttttttatgatcgttatcttgttatgtgtgcttttatgtaattttagtggctatgttggtgattataagatagactattattatatacttaacaaagtctaataaaattaatacttcttttccttctagacaatccaagggtcttaaaatcctttcttctgtttacattttgctccattcgtaggctattgctataaagtactttattcatacacttacgtgtttgaaaagatactgtttttgtatattcatttatatgtacacatttctaaccctttttattcccctgtgttgcaacctgtatctctgagcatccatctgcaatcgtttttcttctgtctgcaaaataccccttgtttcctttgatacagatttaatgctgaggaattatctaattttcttggggtccggaacatatttaattcacttttatttttgaagaacagttttgctgggtataaaatcataggttatcaatgcctgtcctatccaccagcctacaaccctttgaacctatcattccactgtcttttgactcccattggttctgctcggaaacaagctgtcagtctcactgttgcttcttttaagttaatctgtcttcctctcctcttccctagctcttttgattgttctctttttggcaggagaagtgttgttgaaatgttcctctagatctataattttttaattaataaagtttgttttcgggagagtttaaggtttacagaaaaactaagaagacagcatagagctctcatatgattctttccacagcacagttttgtctgttactaaagtcttacattactgtggtatatttgttacagttcatgaaccagtactgacacattatttttaaccaaagcccatagtttacattaaagtttactctttgtgtggtgtctttctatggattttgataagttcataatatcatgtttccctcattacagtgtcatacagaatagtttgcttctattctctggaagagattttggagaattggtatcatttctcactgaagtagttggtagaattcatcagtgaagccatctaggtctggtgctttcctttttgggaggttattagtgatcaacttaatttctttcatagatacagcctgttttttttctggctgaacccagggctggggtcgtcgccaaagtgactgtaggaagtgcccacaagggatagccacaaacccgcctgagatggggctggctgggattccaaagagagaagcactaaaccctgagtgatcatttgaagcgtttattaggggaacttgcctacagagggggcagcagcttccttgtgaccacagcaagacctgagtatgtctacagggaggggtctcattgtggagtttctatgggagttgaaggaaattggctcaccgccaatttctatgtgacagcaacatgctgatctttctgtttcaggcagtaatggaatgctcaagcccacaggggaagtatgcagctgcctggctcacatggtggtgaaggccctctgtgtgtctcagtcaggaaagagaaagggagctgggggtgggcaggccactagaaagaccgattcatgtgatctcttcctcctcatgtgagttttggtggttcgtgtctttcaaggaattggtccatttcatctaagttatcaaatttctgggcgtagagttgctcataatgtttctttattaccctttagatgcctataggattagtagtgatggctcctctttcacttctgatgttagtaatttgtgtcttccttttttttattttttttttttaatgttggttaacctggctacagatttatgaattttaaggaaccagcttttggttttgttggtttttctctatggagttcctgttttcagcttcactgttttttattgtaatttttattatttattttgttttattttatttttatttatttatttttttgagatggagtcttgctctgtctcccaggctgaagtgcagtggcgtgatctcggctcactgcaacttccgcctcccaggttcaagcgattctcctgcctcggtcttccaagtagctgggattacaggtacctgccaccacgcctggctaatttttgtatttttagtagagatggggtttcaccatgttggccaggctggtcttgaactcccaacctcaggtgatccacccaccttggcctcccaaagtgctgggataacaggcgtgagccactgtacctggccaatttttattatttcttgctttaggcttacattgttcttctttttttagtttcctaatgggaagcttagttgattgattttagatccttctttttttctaacatttacattcaatgctataaattttcctctaagcatggcttttgtttcatcctacaattttgataggttgtattttcattttcttgttcaaactattcttaaacttctcttgagacttctttgacccatgcgttatttacaagtggattgtttagtctccaaatatcttgggatttttcagttatctttctgttactgatttccagtttaattttagtgtggtctgagagcttactttatatactttatattctttttaatttctttaggtgtgttttatggcccaaatgtggtctgtctaggtaaattttccatatgagtttgagaggaatatatattctgctgttgatgcagtgttctgtcattgtcatttagacccagttgattgatggggctattgaattctgctgtgtcctcactgattttctgcctgcgggatctgtccgtttctgataagagggtgttgaagcctccaactgtaacagtgaattgagccatttctccttgtagttctttcaggttttcctcgcatattttgagacactgttgttaagtagatgcatgttaagggcggtcatgtcttcttggagaaatgacctttttatcggaatggagtgccatttttcattcctgatcgtttccttgttctgcctgagattgatcaagctgctccaccgttcttttatttgggcttagtgtggtctagctttcttcctttcctttcaaagtgtgtttatattttaagtgggttccttataaacagcatataattgggtcttgtttttttaatccatcctgaccgtcttttaattggtgtgtttagatcattcacattcgaaatgatcgttgatactgttaatacctgccatgtttgttactcttttctattgggacacttgttctttgttttttttaaatcttcttttctttatctgctttgtttggttttaactgagcatgttatatgatttaattttttaattctgttagcacagaattttttttttcttttggagacagagttttgctcttgtcgcccaggctggggtacagtggcgtgatcttgccaccatgcccggctaatttttgtatttttagtagagacagggtttcgccatgttggccaggctggtcttgaactcctgacctcgggtgatccacctgcctcagcctcccaaagtgctgggattacaggcatgagccaagcacagaattatcctagagtttgcagcatacatttagcatgaatctaagcccatggtcagatggcctttgaccaggtcacaggcagggtgggcgcctcccgcagaacacgcccattccccttgcctcccgtgccacctgctgcttcatttcacccatccctgcaccatcgtcaccccacacattgctgctcctatacttcaaacaatcgtccattagatgaacgagactaaggaaagtaagctaggctcagcggctcacagctgcagtcccagcgacttgggaggctgaggtgggaggatcacttgagccccagaggtagaggttgcagtgagctatgatcacaccactgcactccagcctgggcaacagagtgagactctgtctcgaaaaaaacagatgaataaagtagattttatttttccttatttgttacttctctgctctgtctttccacatagatctgagtttctgacctctcatgggattctctggagaatccacctcacactgcttacaggggccagggctgccaatgaccaatctcccccagttttcgtttgtctaagagagtgttttttgtttgtttgtttgtttgagacagagtctcactctgttgcccaggctggagtgcagtggtgcgatcttggctcactatagcctccacttcctgggttcaagcgattctcctgcctcagcctcccgagtagctgggattacaggcgcctattaccatgcccagctaacttttctactttcagtagagacgaggtttcgccgcattgtccaggatggtctcaaactcctctgacaccagaccatctgcctgccttggctccccaaagtgctgagattacaagtgtgagccagtgtgccccgctgagagtttttctttctgcttttcttacagaagatcatcttgctggatgcagaattccaggctggtgctgttttgtttcagtacttggatacctccctcccctctctgctgcctgagtggcttcggtcaggaggtctgatgcatttctcactctcttggttgataatgaagggctctcccttctcaggctgtcttattttccacagttgaatatgatatggctaagtgtggagtttttggtatttttcctgcttgatgttctctgagcttcctggatctggggtttagatttgacaaatctcggccattatcacggcagatacttactgtgttcgctcctcgcctccttctccttctggttttcctgtcatgagtaggttccaccttcacggtcatcccactgttcttaggtcgcctcttcttttgttttcattgctttttcctcagtgcattttagtacgggaagtttctgtggacctgtttttacatttgctcatttatgctctcatctttatttttattcctatactttctgcatatgttgttttgttttttttcattttttatgttggttagttagcttgctactttcagttttagcctttctactctaaccattaaattaatacattttcttctaagttattcattcttgagattgtgccactgcaccgtagcctagacgacagagcaagaccttgtcttaaaaaaaaaaaaaagtattctttttgcttaggccgctgtcgtctcagatgaagtttctcctgtcttgtgtgtgtttttaactagtgcctgaagtccgtccgatgttttccttcgtctctgcccacagccaccgggtcagcctccctcccaggaggcccctagactccgggtaccagggcagcccgggcaggtgagagaggacccagggagctggctttgctctcacagaggcggggtcctcatggtgttctgctctagcttgttcccatgatgtcagggccgggcgtccccctgcggctcggtctcacagctgccgtgtgcccatggcgttccgtcctctgaaggctgctgggaactgcagggtcagagccgcaggaaggcaagggtgggggccgcatggtgccggggccgggtgcacgccttgatgggaatgctggggtcacgctggggctgtggatagcgatctcgggcctcgtgagttcctccttccggcagcccagagcgggggttagtgccccccccgatcatggagagccacttccagtggtctcaccagtgaggctgtccatggcactgcctccccgggctgggcgctgaccccgggactgtagggccgcagcctgggcggctcctctgtttgcagcaccagccggggctctgcccctccgtggtctgagcgacagggcagccacaacagctcgcagctgctgagtcctcttccctcagccctgtgcctgcctggcggttctgaagatcaaatgaggtaacgtgtgcttaagtcatatgtagcattagcatgctgtgctgatgtcaccaattaaaatctgcctgagtgaatcatacttgaaaacagtcagttgtcaaaaaaaaaaacctcgtttaggggcagcaggcccaggaaagagaagcgagggacagacaggaggcgaagcgttctgtagttggttgtgggggccagggcatccggcccaggagcaggcgtgggccgagcacagggacgccgcctcatgtgcactcagcactgtggcgtggcgaggcgtggccttgcgttgggggtggtgaggcgtggccttgcgtgggtggagggtggcgaggcgtggccttgtgtggggggtggctggggctgggccgggcagcccgacccccacccccaacccctgtggccgtaagtggccctccttgctgccctttccattgacgggtgctgtctccatgtacttattaatcctggtgcaccttttaagcactctttggggcattcgtgcccccgttttgcacaaggagggtgggttcagagacgttaggtcccttgcccaagggtgcacagctggtctgtgtcagattggagcgcaggactgtctgacccgcgtgggtcctccgaggcgcttattactgccgctttcgcctgtcatcatgttctcgatgggccccacggatgccagagtcctgctcatttgggaaacgaccagctgggatgagggttccagagagaggcctcctgcctctcccagcctctgtcccagcagggccttctcctgtctggggcgatcttgctgctggggtcacagcagacctgtccaggctggtgactgggggtctggggaaagagtgggcagaggactctggggaggcgggtggcagcgaggagatggtgccggcgtcagtgggcagagccgtgtctgcagccccacgttcccgcctgaatctattcagtttcttgtggtggctccatgcgtcgggagaggtaattagaacagggcttttcagctatttatgatcatacatttccttttctaaaaaaaggagaagttgtggagtgactcagagttgggtggaggtggctgagctgaggtgggatgggcttgggaagaggccctgcagagaatgtcgcatgtgcagaacagccttggagcccttgcagagtgggcctcggccttgggctggagggggcggagggagggaggcaggctccacagcactggtggcagaggccgggcgggagtgggtggcggaggctgggtgagggaggaagatgggtgaggggctgctgcttcattggagggggcacgcggtactcagcttacttctgggcttctctggaaagtgggggttggtgctggggctctaaggaggggcctctgcatatggagctgcctgcctgcctcacacagccccttcaggctgccactgactcccaggagggaagccctctgtgtccatggtgtggacttagggagtgctgggcgcctgcctcaccaggcgtggccatggccagaggctgtccccatcgtgcgggacgcgcctgccccacctgcctgctctcctggccatctttcacgagcagctgtagtcatagtggaagaaccaggcagacagcagcgaggacagaagtgaccaccgtggctgccgtgcattcatcgcctgtgtatgcgggttccgtgtgcctggttttctgtgccatgctgcatttgaacttcacagtgaggctgaggcgttctctgccctctcctgtgtggttgagtgtcctcacactcagagaggctctttgtttttcccaaggtcacacatctagttacggtccaggcaggatgtgggcttcgttgggtgtgtgtgttgggtctgacttgggggctggcctgggcatgcacacctcaagtgaccgctgcttgggggccacggggccggtctctgcccactgcggtgcctccgtccatatctcccctgcccgcagcacctccaacagggccggcgtcctgcagtctcccgctcctgtgggtgctctcaccacccgcagccctggtctctgtctcggcttcctggtctcgctgctctgatctcccctgcccttcccaagcccaggcccaagggctgtgccctgggtttcttcttccaagggcactgggccctattctgcccactgtctcagcccctgctgcccaggtgtcctgccccctgctatggcgttctcagcctctttgggaatctgtctctcattgcgtgggaatcatcggcatgcttggggcttatactcaaaagctccgtggtaattagcgcgccggagcacctgctgatgagggaatgagcgtcattatctctcttgctctttcgcaagggtcctctgggcgcctactcaacgctgttccctctgattggagtgcccttccccaccgctgcctcccagggcgcccagatccttcctgcagcctccctgggtgagcagcccctctgcccgactatcgcaggccagggcagagccgccctctactgctgcccccggcccccatcggccggtgtatccagggcaccgaggccctgtcctcagctgacttcttccaggtgatgccgactgctcaccttctcttcacatggccgttcgttgcatgatgagcacattctattccttagaaccgggacgtttctgtacctaaggaggagcagccagtggacaatgtaactctgctgggtgcttcttaaagcgagtctgggatgcccccgtcagcactgccagccgcctgtttgttcagcagttaatcaccgcatttgttgaggtggaaatgaagtggacttgcccgcaggtggagtcagctgttaaaaagtcatagcaagtcacaaccacaccgtgcctgctgtttcactaccggtgacaaaacaggttcttgaaagggtacaaacaacaaactttctaatgcttttcttctgtgccagccagtgctagcctggagttaggctgaagagagccgtcacgaagagaagctctcagagatttactgatcaataaaagagacaattacagcttgtttaccaagggaagtcccccgccccggccttgcgcggcgtccgcgcgttggtactgacaactccggtaactggcttgaaacgataaaagtcaatgggaagatataggatttcaataagattatgacacacgataaaccttccggtgcaaacaaattttccacagatacgtgacccgttctagttggatttgtaactttaatttctcacttattgaattttgaattttttgtcatcagctaattatgaagtccacaccagggtggcacctgtgtccctggctcaagagacggcaggagagccccagacgtggcggcctgagctccagggtcttctgagagagcaggccggggtttcctgagcccctgcagcctcgccctcctcgcctgtgggggatagaccgagggcctggcaggggccaggcagtcatcagtgctggggagcactgggtcggtctctcctaggagccaggcggggcctgggcgggggctcagcttgtgtacgtgcagactcaggaggccgcacggaagggaccctggcagttttgtgcactccgcttctgggtgggggtcttgctccccaggctgcctgagtgagccggtctctatcagggccatgaatttgccctttcagccagtactggtgggggcggtccccacagctctcctgccctcacctggtggggagcacgctggccacaactcaatgaggtggtgcagggctgtgccggagcattggccccttgcgcagcatgtgtgttgggaaggggtgtgggccagtggagaccgtttcccgggtttgtgaggtcctggctctcgcttcttgagcacctgttgtttccagggcagctggctggacagttcattcctgacagcatcagtcttcacggccaccccatttcccatcttatcaacaaaggaactgagacttggggagggaggttgaatagctggcctcaggacagagctggggcttgaacctgcatcttatagatacccatccgcttcttcctgggctctactaccccagcatcctcatcctccatctctcaagaatggggcagagcccctcagcagaggctgctgagagcatcagttagatgtccctggggcacatgttagaagggcagattcccaggcccaccctgaatctacgtccagggcatccagatgcccgtgaagatctggaagctgccctcccgcacacctgggtgggtgtctggagggctggctccctgatcatgtggttcctgtgggctcacgcagggcggacaggcaggagaaggtcgccagcctgcgcctggaatctgctccatccagactcagcgtctgagaccagaagggtccgggggctgtggttcaggcccacacctggggcagggagtgcaggcaatgggaggccagagggaagaccacacttccccgcagcagcacgtcctttttgggggccatcttggcagctcagttcccgacccatgggcacccgcagggtctggaggcagcacacagctcccggggcccctgactggctggcaggacacaactgagcaggggtttctgcccggctctaggaatcagccctgacactgtggtcagtgtcatcccaggaagctgagccctgctgggcctggctgctctgtagggatctgcgtgtggcctccgacatcctgggagctctgtgggaagacaaggagctccccagcccagagctgaaaagcggggactcagccttcccgagagccctgggcggttggacgagcgatgggtttcctgtcccattggaacgcagcagcttcctggtgcacactgtcccctccctcgacaggtccgggcagaggtcccaggaagagggggactcacccagctctgggcctgcccactgtcgtttccctgggcccagtgtgactgggactcagaggagtcacgcagacccaatagaacaggctggggtggggaacctgggcttctgcccactgtgcgccctcgccttgtgtgtgctgtgtccacaggggcagaggcgtctgctcccagccgaccccatagccatactgccggtacgaggtggagcccacacccgctgtagtgaaggcctgacgtggtcagagcgggtgccgaggcaaagccagggctgctggcatttactgggtctggggatgctgaactctggggccctcttcactttggtgggccctcaggggtgggctctgagtgctggcctgggtcctcacgagggagcccccgcgtgacccagctctcgtggggccttccctgagccgtctccatcattacctcatcccccgtcccgggtcctgatcagctgccctctgtgtccacaggagcgggacggtatgcgggccatcctggggtcctacgacagcgagctgaccccggccgagtactcaccccagctgacgcggcgcatgcgggaggctgaggatatggtgcagaaggtgcacagccacagcgccgagatggaggtgaggggccgcgggcgtggggctcacgtcgccaggtggggcttcttcccggtgggccttggcagagcctgcggcggggaggtggaggtctggaccccgcctccccagttcccggctggcaggtgtctgtcagggagggtgtccacgggctgcttcctctgcatgtggatccacgttaattctcacgatggcacctgcagcatcctccgctgtcagggtgtctcaggtggtcccagcctgcaagcggatgacagagggacagtgcccctttgactggttaggaccgcctcatgatgcctgccaaaggggcactcaaggtccttcccctgtgaggggcatctgccaaggagacctggtctccgggtgctcagagttgttgccagggctctagtccccgctgctggggaggctctgctggggcctgacgggcagggtgtgaggcccagggcgcccagctccctgtggaactgggagaggtgttcctccttgttgcagcctccaggctgcatccctctcctggctccagggttctcccaggagaggtggcctcagccttggcttctgccttttccctgccccatgggccaccgtgacgctccgtgcccttgtctagctctgagcagctctcacctgtgcagtgggaagaaggagctgggtatcgcagggcctgggcggaggccacgtccacactccccatccacacttctcatctacactggggccgggggctcctagcacaccgttcccagcctggagcttgaaaggcccgtgttctcctctcaggatttgcaccacttctccgtgggcacagtgcagccccgcctgggcgtggtgggatacctgccagggtcttctggcctcgctggcacacgccgccgccgggtgccttaccattctgctctgcctggccctttacctgactgctcagtctcattgtcaccgtatcctatggagtgggtgccgttgtgatccgaatttcgctcacgaggaaacccaggcctgggggcgtcaagggacatgcccaggtcaccgagctggtgtgtgacaccgccaggccacatctcagagggcctgggcctgtggtgtctgcgagcacagctgaacagccgagctctgtgagctctttggtctcaagggtcactgtgtctgggctgggccttgatggtggagactgcggtgagatggagatgcagatgatggcatcggtgtggcctgttgccctgttgtaggctgctgtgtcctttcctcattcagccagtgaccagctggaagatgacctgggtcccccgatggagagccagcctcacaggcgtgaccacagccaccttccagccgggctgctgagcacacacagcaggctgggccgtgtgccagggaaagtctgacagagcctctggcccctggagccgagctgctgggtaggggagacatttaatgaacaaacataattcatgtgggatgttaggaggagctgaatttctggagaaaggattgtaatggagggtctcagggagctgcgctgcatgggcgtcccagcagctgttcagggaagatgggagaaggaggtcgccaaactacatctagaaagctgcttggcagatggttcagtggtttagagggggcgtgggcacagaggctcaggcactggggatggcacttggcgagaatgacaggtcccagcccaggaggccccaggcccagggcccacatgcactcgctaccccttgctcacatggaggccacgccgaagggccctggaactatgccgtgtccccacctatgggtgagccctcaaccaccaccacgcttgacaagagtgaaccctgggtgtgagaccaccctcaggcactggtactgccccctggtgtgttcttctgatgccctgccccctctgtccatcctccttcctcccgctcctggctttcctttctgtgtctagccatcccgtgcgtgcagggcctgctgcggagggctgcacactgaccttcagtcgtcacgggaaaggctagctccggctgtacctgggagctgtcgtaaacctaagtgcgttaatagccatctcattgcaacacccttggctccctgtgaagcattaatgaagagagatttgcggggagggtctctgaccccttctgccgtccctggcgttttccacgttgagcgatttctccagcctgtgcttgccctctgcactgtgattggctcgtcacgggcctggccgtgggcacatccagagtcctgggttctggtgttttgtgtgttaaggcgatcagggctgtcagggacctcaggactcattgaccagatgctggcactgtttgggcaccgtgcttgcccccttgccgggcagcttggagcctcagccctcaccctgctagtgggatgtatgttgcggaccttgcccctcccttcccatggtggggtgtgggggcaggttactccccttcctgtctgtctcctggggtttcaggagaattaggcacatagaagagttgggcccagcagggctagagcagggtcagactccaccagcactgactagtcctcactgtgggagttcacacggctggtcctccctgagccctcacagccttctctgcccatccccctgggtaccctccagaagcaggccagcacctgcagtctccccccaggaccccgctgcactggcctgtctgtgttgatggagacagccacggtatcggctgctggcacagattccagagaggtcttccaggcccctggctgttccctgagcctgtgcaggtgccactgccctctggggtctgtggagcagccaccaccacatcctgcatgacagcgtgacctgatgccttgcctcatcagagggggcacctccgcgtcagctctttcctcccaggagcctgggagaggtgtccctgcctttctgcctcagcgggaccaggtcacctgcggagcctgtgccctgcctttccctgaagtgacagtcgggtgggaggctgggggtgccgccagctcctgggctgggttcctgcctcaggggagcatctgctgggggctccccacctcctcatggatgtggcgcaagttcgggagaacgtggccccaactctgggaactaagcatgtttgcaaggtgaaggcgggggcccagcaggagtgctatgctccagggaaggttggggcgcggctgcacatgaagtgtggcaagggtggctgcaccctctgtgcacagggagcccctggggcagggacgccagcccaagccagggatgcccccgtggagggccaaggggctgctctggagaccctgcacatgccgcgtgtctctggctgttggtttctgtgaagggcccgtctcctcttctcctcacggtcggggggtggggggccgccatcgccccagccggggagggctcctgaccccacagagcccaggtgctccccccgaaccccctgcctccctctctccctgctacctccacccggtttttcttttctttctgtttcccgtctccttttcccttcttgattttctttctgtcctctgcacgcatgtctgatagttcctgtctccatctttccctctcccttggcctctgttcacccctctgtccccccctcacactcctatgtcttctgacctcgggcctcgcaagccttccctggaagcttgcccggccctgcgcatgcccctggggaaggcgcctctcggggcaggtgaggatctgctacctgaccgccaggtgggctcggggtagtcgccagcgggaggatgcagcatcgctctgagagtggttcccttccacccacccgttagctaaaccagacaccagtctgttctcatctggaccatgttttcattctagcagagacgttgcaggaaaacagtgttgagttgggagaaccccagacccgtctggtgaagttttgccgtcttgcacggtgttatttattccatttaataaagcggctgcgggagcccgtagcatgtgtcaggagtcctctgtggatagagctataaatacgcagtgcacgccaccttgattcaacacattggcctgatttgtgtttccgatttatttaattaaaagcgattactgcgctgctggccgtgtggaggtgtgtggagaatccccgtttcaggttgcagggactctgaaatagttcctaacgatttaggcagaagtggccgtcacggtgtttccgtcttcccttcctccccgtgacctcccagaggctcgggcagctctgcgggtgctgtcacttggctgccgtgggtggtttggctccaggagggctggggagagcctgatcttcagggcctcgggttgttcaccaggcccaatacttgtgagtgtgttggtgatgtttccctcattgaaagaacttgagatgactgtactgtacgaagcagagataaagccaaaaaaaaaaaaaaaaaaaacctgttaaaaatcatgcagtgaagaaaagtgggccaaggggtttatggaaaccaccctggagtctgggctgtgggagcctctgctgtgtggccacaggtcctcagtgggaatcgcgaggtgctggctccattcccagaacggggcgtctgtgcagtacagaactgcgctgagccgggctccccgtgacacgccggtgccacccccggcagcacacacttagagcaccgctgcccagcacaggagctgacgttgctgggcgtgaggaataagcccagggcaggctctgtcctctccaccatgggaggacctgctgccaccctcagagcatcccccagggcctgggcgtccaccccctagccttccttgcatcaggggctgcagtggagcccctgaccgtgcactgactgcctgttgtgtgctctgtggccagcgctgggctcacagtcatcctcagacctccacccacagggagagcttctgtgtacagcctcacccaggggcaggtgctggggctgtggcctggttagccctgtggggaccctgtggtgtgccgcctcctgcttcttcacgttgtgtcacaagccacttggagacctggccaggaaggtggaggcctgagcttccgtcccatccttttccacgtgaccgtgaccatgaccaccggtggggctgccttcccctagctccagcctttgtaccgtgtgtggggtctgtgcctggtgccctctggtcctcctcagtccggctgtcctgtggctgctggggtctgtggctgcctgtcctagccattttctgccatgtcctggctggcaggagtgttggatcacaggcagcaacttctcacctcaggataaaaatagcccggctgaggcctctgtgcagcacctcggtggtgccaagggcgccagggcccggggctcgtgtctcagcacacgtagccacccgggacacgtggtcccacccggaaagagctgtgtgtgacccttcagctgcttgggtggaggcagctccctggtcactcggtgccagggttgcggggccggggcgtggctgcgctgggggcctgctcgtactggttttcccgccatgtgatgaaaccctctccccacagcctccgcacccctcagtgctccctggtgtgtgcccctgaagcctggctccgagtgggcttggcctctcctggggaacccgagcactgcgtcaggtcgtttgggatggagccgtgttccttcccacctgagcttcctgcgtgtctgcgtctgaggctgtttgggatggagccgtgttccttccccccctgagcttcctgcgtgtctgcgtctgaggctgtttgggatggagccgtgttccttcccacctgagcttcctgtgtgtctgcacccagcccggggtgggctgtggaggaggggctgaggctggggaagtgcctggcctgcctgcgagcaggcttggcatctggtgttcccagccgtcagcccagccccgaccccgggccttgggaagctctctctccatcccaccatctccgcatcagaacaggctgcaccctacactgccttgcggagccaacctgagcttggggagctcttgtctcagaggtgaggacgctgtggccagggcctgggggctccacccggtcacccagagagtgagaggtgtctgtgtcccccgaaggtgactgggcagccccacagtcagtgctaaagtgcactgtccagggtgtttccacagggggtgctctgccgcccacccactgcctccatcacagatgcggtttcctggaggaaccctaccgagaccagcctggagttgcgctgtctgaggccctgtgggagctgctctccaatgcacacacgggctgtgccagctcctcgcccttgtgagtgtggttctccccgagctctggggattccatgttttaaaggcagccttattgaaatatgatttatactcagtaaaatcccccagctttatctgtatgatttgatccatgttgaccgtcagtttcctgccacccctggctcgtggagacaccggtctggggcctgtgactgttgttttgggctttcttggaacttcacgtaaacagagtcctgcagttgctgtgtctgtcatctctgactgagcacagagcttttgagacccatcaacgttgtatcagcagttcatttacttttattacaaaataattctctatcctgagactctaccaaaatggtctcgtctgttcacccactgaccaataccagggtggtttcccattcttgccagctgggacagagctgctgtgaatatctgcgtgccagacttcctgtgaatgcaggttttcattcctttgggctctacatccaggagtaggattgtggggtttaactttttttggcggggacagtgtggggacagagtctcgctcagtcgcccgggctggaatgtagtggcgtgatcttggctcactgcagcctccgcttgccgggttcaagtgattctcctgcctcggtatcctgagtagctgggactacaggcatgcaccaccacacccagctaatttttgtatttttagtaatttcaccatgttggccaggctggtctcaaactcctgacttcaggtgatccacccgcctcggcctcccaaagtgctgggattccaggcgtgagccaccgggccgggccctaacttcttaagacattgccaggctcttcccagcggccataccgtggcaacacgcggggtccagtgacgcgttactgcacaggctgtcggcaccagagctgggagaacgctccgctgtggcactgtcggctttggtatctggatccagcggggcagcagcacatttagccctggcttcaatctgtgtgtctccagtgactgacgtgcccagcgtttcccgtgcttctccacctcggcgcctcttctctggtggcgtctgttcaggtcccttccctctgtctggtgctggcctgccaggcccagctgcccatctgtgcctcctggagttcccattcctctctcctcacccagcaggcctgctgggctctgtctgtggcactgccccggcctgcgtcctgggggactcaccccatcccctcccgcggctctgagctctgagctgcctgccctccctcgcaggaatcccactgttccttgtgttgtatctggtgtctggggactgaggtggggggtgtgtctgtgctggttcctacagcttgtccagaaggagaagttctagcgcattttggagcccatgagagcctgtcccccaaagcttcctggtgccccatctgggagcctcctctgcgcacacagagagcgtcgtcttgggtctctcgggaccccaatgtcctgcctcgcctctcctgtgctgggccgtgcgggtttagtgatgtcctgtctctcctgtgttgggctgtgtgggtttagtgatgtcccgtctctcctgtgttgggctgtgcgggtttaatgatgtcctctctcttctgtgctgggccgtgcgggtttagtgatgtcccgtctctgctgtgctgggccgtgcgggtttcggtgttttctttgtttttcttactttagctgtgttcttggaacaataaggtgagggaggagtggacgtttgccaaatgctcctcggtgctgggactctgctgtgagcttctcacaccctccctccacagaacctggggaggcccaggacaggcacgcattgtggctgacaccccaggccacagccaccttcgttctcccaactccctcctgccctgtccacacccgctcccatgtaaaacattcttttttgttacttggaaacttcatgtctgaccacttaccctgttggagctgcagacagcagtgtgtgtccttgaatggccacagggcctgctcgtctgtgttctctcggtgttccatggctctgttcttaggagcacccacacgtgtcttttcaggttatgagtgagaggtggctgaggtgtcctgcacccacaaaccttgtgctgtagaatgtctataagccagacctgagctccctcctgcctccctgccgctcccccatctccatgcccatggagcgtgctctccatttcacactcctggaattccggcccctctgcgtgctgagcttctgtctggtggctgctctgctgagaaccctccgcctggagtcacctctgactcagggttgtgcagtgtcccatttggccatccatttgggaagatgcagccggttacaaacgaactttttttgttttgttttacatcttcgtttttgtttttttgacacagggtctcactctgttgcccaggctgaagtgcagtggcccagtcatggctcactgcagcctcaacctcttggtctcaagggatcctcctgcctcagctccctgagtagctgggaccacagttgtgtgctaccacacccagctgatttttaaattttttatagaaacaggatctctgtatgttgtccaggctggtctcgaactcctaacctcaagcagttgtcctgccttggcctccctaaatgctggtgtcacaggcatgagcacggtgcctggatgaaaccatttctctttatggtaacagaaccgtccttcttttcctccctaattcgtcccccagggtgctagagtatatgttttaatggaaatataacacaatacaccaaagtgcacagattgtaagttttcagcctgtcggacgacagagcgagtgtgtgtgtaacccccctaatgcaggcgaagacacagaacttcctgggtcacacaggaccccgtggatgtctctttgcagtctgagtgacacctgtgtgttcagtcttcagtgaaaggtggctctcactgtctgtaagccgtctgtcttcatggctggatggctcctgtgatgccctctgctgtcctggtcgcctcctggggagcactcagctcgtcgatgtctgccttcttgaacccagggccctgcgtgtgagccgagccatagctgctcctgctgacgtgcggtcgtcctcctggccgcatcccggggctgcactctcacgggagctgctccaagcaggccctgcccaggtacccgagaccagtgcgcgagtctgagttcagggctccttggctccgagtcacctttcgccagcgactgtggctttgaggatgtatcagaaatctcactggtgtctgtgtttccaggccctgggtcatgtgaggatttcagatgcatgcgttctgttttttccagccatcgatggaagtgctaggctgaatggggctggtacggaggtggacgcctcggcctcaggctgatgagccgcttgtgaatgaacttgtcttcagacacacatcactcagtgctgtcctcacagaaacctgatgaagccttcggaaaatgcctgcagcctgcccgcgtggcgccggaggctgtgaaggctgaggctgctgtggcctgcctggcctcggcaggaccctgggctggccaccgtggtcacggctccaccctgcagtgattctgtgtcgggaggcacaggagagcgtggttggtccgggcctcgcgcacagctctcagccctgctgcttccggacgaccctgcctcttctaagctgctcctgtaaagtgcctttgaccttggaaggttgccatgtgaactgatgtaaatggggatgacgatgtgcctcacctgtagctgtcacctgaggccggtgcccatcgtgccagccgcctgtgtgcccaggacagtgtgccgggtgtggcggacatggacgggctgccaggggtgtgggtggctctaacgggtgcatctcgctgcccaggccagctcagagctttgccaggggtgcgggcagctctcatgggtgcgtctcactgcccaggccacctcagagccttgttgtcgtcccccctgtttgggctgctctctggcctggtggcctgtgggtgctggtagacctgggcggggtgtagggctgcgtgaggagagcctgagtgtggactgcagctgcctcccatgtgctgaggctctgcccaggggcatggggtgccctggatgccccgacccggctccctgtgcccccgggagtgcccagggctgcagctcggtgaagtgcgttgtgtctaggcccagtttgggggatgtccctcttccatctgccgttcccagtcccagctgctggtgaccccagcagtggccggattatccagggttcagctggctgtgaggagggcagtgtgctgctcctaggcctcgaggcaccaagctttccagtgtggggtccacacagcccagcgtggccacggccacctgcctcctgatgacagtggctaggctggctccagggcctcccccagggcagtgtgagggcagcaggcggggctggtcatgggcagagctcaaggccttcccctcatccacaggcgttgcacaggggtgttgggcaatgggggtccctccggtggccccactgagtgaggccccacaccagaggcttgggaggctcaggtgctcacacctgcagcctccacgggagcacctggagctgggtttgactctgctgtggcgtccagaaccagcaggcaccaggatagcccgtgggaagtccagagcctggctctggctgggcctgtaggggagcttgggggcccatggtctgcagagcggacaggttgaggactgtgggctgttgcctcagccactttccccaggctgtgtccccaggggctgtagtgccttgttttctgtgtctccaaacatacttcccccatccccaccacatgtgcacatgccacacacaggtgtgcatatacatacccacacttgtgtacacgcacatacacacgcctccccgcctctctcccgtttctcctggtgacttgcctggtggtttccagttgccgctgggccaggcatctgcctgcctctcgatttctccctcaccctcaggcctgctgggcctccaccccgcagatcccacaccccaccacagccacctgcctcactcctgggctggccctccatctccttcccggactttcctgtgtgctgtggcctgggggggtctcacaaggccccctgcctcgcccttcctcccaggttctaggacagagccgcaatgtgtttaggtggtgggggcagtggggagccaagcggggtcgtgggaaggagtcaggaaggggcagagggagaggatgtgggggaaggtaggaaccgcaggggcagaggcccagggcgggggtctccgaggtcctgagccccatgcaccgtgcaggtcatgggtgcagggtcactgtccccagcagggagctggactgctgacatcctggccccacaaccagacccagccttgctgctccatgaggcctgttaggaggaggcggctggcttttcattgctggcttttctacccttagtgtggggtcaagcctggtgccctttggggagtgtgtcggggcaggagacccttcctgcctgggtcggggtcctgcttgggggtggccgtggtggaggagatgctctgaggtggggcctctgcctggaaggtcacctgattctgttctttaagcacgagcctgccagggagagtgaattgatttcctctgactgaaagtcccatgctgaacctttccctccgtctctccccagttccacagtccctcttgggcccacccctgtccaccccattcacagtcagtttcctgaggcaggttttaggaatggaccttggttctgtgaagcctcccgcagcccactcggtcttcgtctccatcagttgtctccatcactgggctctcggcctcgcggggcagccacactggcccctgcccaccctctggctgcccactgcccagctcctgggtcccgttgctccccagagagtggaggctgcggggtggtgggggttgtgttccctgcagtcctagaaatggggcctggcccaccacagtctcaggccgaatcctgtcttgtcttgcaggctcagctgtcgcaggccctggaggagctgggaggccagaaacaaagagcagacatggtgagtcagacgcgggagtggctgggattcagggcacctggaccctgggtctgggcagggacgcctgtccccataagcctttaggctgcaggcgccagtgcatggctgcctcttctgtcgtcggaagctgcgttgagcggggaagggtgtgtgaggagcctgagtcccatctctactagtgacaggtggcatgcgccgggggggagcacagcccctcgggccccaccaccgtgtttgtggcagggggccagtgacatgtttgccgcatgaggccacggtgtcggggcaaagcaggtgtgagagcctacgaggggtctgtccagcagcgaactggacatcagtgctgtggcttcatggacccctgtcccgaccacacaggacccgagtccccagtgggacagtgcctcagccggggcttgggcgccactcagcatgggtcctgaccaggagagggacgtctctagtgagtgcttatctgccctctgtgaatgcagcaggcgtgcttttaagctgttttctcctcagcccacatgggccccactctcctggctgcctccgagcctgggtggggggcccgcagtgtgggcccgtgggggaccaggcaggctctcctggtttctggacctccagtgtcaaaagcttcccactgttttagggaacaaatgggctttgcttttgaagcgttttggcctaaacaaagtgtaggttccctccatgctgccctggccttggccatgtctgtgaaggacaaggacggccctggggcatgcgtgcgtgcgtgtgtctgcatgttctgccctgggccatgcgtcaggctggcctgggtcacaggcagagctgctgtcggcgttgtacggaccccagggcctgcagcccaggtcgaggctcccgtcgggcgtccttgcttgccagctcgtgactgtgagccggtgtcctggctctcagggcctcagggccttcctctccacccggcaggggtgtgctgagggttcattgcttgacaggctctggggctggcggcacagcctgtggcggttgtgggtgcggccatggttacaggcccttctcatgggacagggttggatggggttggaaatcaccgtcttgagaggtacgggcaccagggcctaggctgggaatgggcgagggctgtctgcagaccctggaagaagctgcccagcggcgcagagaggcaacagcagggcaccgcgcgggtctgggcagagctggcatctgcaggaccaaggccaggtgggctggcaacagctgtcctgagcctctggaatggtcgctgttcactcagcagctgcttaaggacattcttcttggtgctggggacgcggcagccagcaacacaggctcctgccctcctggaggcacactgttgccaagtgagtagtcagtggcccataggagagtgaaagacagaacttccggtggtggcgaatggaggagccgcattctcccggggccgctctgcagagcgtcctgagccaagcctgggggacccgactgttggtggtggaaatggtggggcaggcaggtcccggacccaacagtgaggttaggggtgacagaagcggggtccgcggtggttggtagtccaaccttgtgggccctgtgtggtcacggcagggctgtggtttcatgggtggaggaggtggtgacacaacctggtgtccattcgtaaaggatgcctggctgctctgtgcagggccgcaatgggtgggaagtggcaggccggggtgggagacgcaggtgccctgggctaggactgcaatggcgtgcggaggcgtggtccgagtccgctgcgttgaagggagatgcaggtgaggtagagagcgtgagggctgggaatcaaggacggcttcggcattccgccccgggtgggctcatggtatggggtggggagattgagggtgaagtgtgggagtctcacgcctgccacacgttggatgcacagggctggaggctttgagtcggtgccctggggtcagaggtgcccatctgctctgcatggtgtttctgttgttgggaatgagtaggtagcagagaagtcagaactggaggctcaagcctctttggggcattccagcatcctggcatctagtcttggggagcagccatgagttggggtactccgtggagggcaggtgcattcacagagccctggagaaggaagtgttttcaggggacagtcagactgcagagaagacccggaaggggagcagaggattgccctgggccctgcggccggcgtttcattgatgagaggagaggcccagaagggcctggtcaggggctgggcctggagccgggagggaagattcgctttaccgatgggcagtgggagagcggtttatgctgaagggagccttactgtagtgacgggcatgatgtagggctggggcagtggaggggcatcgaaaggggctggggccagcaggttgctggagcttcctgtctcctcctgaagtgggcatgaggcgcactggcctgtgagggtccccgcagtcccgctgaggtttgtggtgtaaacttggagccaggttgggcgtcaggcttctgtctgccacgctcaggtgcttcccagcagacacagtcatggggaatggggtttaccagggcgggtttgccaggggagcgcagtggagggagggaggcggagatgtgacgctttgctcagcggagggaaaatcaggctgttgggggctccaggacaggcctttctcaggtctgggttttaaaattggagaaattggagtatcaaccatgtttttctttaggctgtagaaatactggggggtggggttgttgttttgtttattttcctctctgtgttctgctgtgacctttcattgctgatgtagtttgcaggggaacccattgtaactgtattgtttaatggcaggtctgagactcggtttccattcctctgccctcatctgagatggctcagggcaggcctgaaagatgctcctgcttcagtgagcgggttagtggggactctgtggagtgtggggtctggtgtccagcagtgtgtggggttagggggctctgtggactgtggggtctgtggactgtggggtctggtgtccagcagtgagtggggttaggggactctgtggactgtggggtctgtggactgtggggtctggtgtccagcagtgagtggggttaggggactctgtggactgtggggtctggtgtccagcagtgagtggggttagggggtctgtggactgtggggtctggttcccctgagtgcaggtgttcaggaaggatgccagggtcctcttctgcctgtgtgggggcttggcggggggttggcagggggttggtgggggacacacccagagccttcctagttcccagccctgagggctgtcggtgcttccttctcagtgactgagctttctggacccttcagtgaggacccttttcctgttgcctctggaacagcctggggtgggtggagggatgctcccatctgaagatgccctgtggagaccctggtgttctgtgtgtcaacacgctggctgcctcactgttggcctgaattgaaacgtgcctgggggccatgcttctgcatgtgcaggaggccaggagggttagaaatggagttgtctgagcacaggccaagccctcggcattatggctgagccacctgcccggcacctgcagctgccctggagcatggactccccatgtccaacagaggcacggacgcctcggagctggcatcttgacccgggcatcggcccttgtctggctgcaggtggttttggaggagctgctcactccagtcctcttttgtggggagagagacagaaactggtcttgggccctcaggtggggtgggtgtggccgcccctggagtgctggcttctccagatatctggttctggtcagggggctgtgaggtgcgcttggtgcagcgctgggctggaggtttggctgcttttcaacctgtgttttttctcttttttagcccatataatttctgttccttattcatcgtacgcagcaccgtttaagcgctaatgcctgggccccaagctgcagcatttgacttcgaatttggtggtgggaggattgcccccaagcagaatcatgattttacccctccctgggttgagctcctgttcctggccccgtcctttgtttggagccgcagggctcccgagggacgagaggaggggtctcgctggctgtgtgcccctcttgccatgcaaagcccttcagaggaggtcctggggagagcagtgccaggcaagggggctacagacaccgtggttggggctggcccctgccaggcatgcctgaaggccagtggcctccctcccctgccccccgccaccgcactgggctgtgcagccctgggctccaggttgccccttctctgtgtgacccagagccctcagtgtcatggcttcttcccgggggttacaggtgcatgttcctgtctgaagggggtctctgggctgcgggacagcctgactcccttttcattttatggtggaggaacctgagcgggagctcgccctgagctgggatggctggagtcacccaggtctggctctgaggcccctcccacccagttccctgtgactggctcggcagtgggtgctgtctggggaaggggctcccttgtccctggaaaggctggggcctaggtggtctgcaccctcagggcttgtgtggagaagccacattctaggcagggctgactgtgtcactcacgccttctgtccacagtggtctgggacatggccctagtgcccgtcccgtctcccagcctgcagctcctttacctgctattttccaacccaaagtcattttgttatttaggaaatgagaaaagagagaaaaaagaaaaatttaaatctttagttaattgccaatgacaagacaaaggcactctgactttcttattattaattagcaaacccgtactaattagtaagcataagtacaattcatgtttttttctttaaatgcaattaatatcgcaaggagagatttcctgggccatcgtcgtatcattagcgaacccccctaattagctaggcccgcagtggctggagatgggagtcttttgattacagctctaaaatatcctctaatattttatagactttggggagtgaggagtgaagctttattttccgattcagagggaattacgccgctctcagctctaaaatatcctctaatattttatagactttggggagtgaggagtgaagctttattttccgattcagagggaattacgccgctctcagctctgattaagcagcatcttccttgattgctgatttccctttgtggcccctctgcgcctgctccttgctcccaggggcaccctgtgccaagtctgcctcaccaagggccgtggctacagcagcactgaggcccggacaggctgcttcccgtcccccacccttctttgtccatctctgaaatgggaagggtgtcgaggcccactctgagtcgggcctagcggcaggtgctttacagacagattctgaaatctggcgaccgtgagcagggcaggtcccgtgggcccatgaagaagctctaggctctctggggtctcccgtgcaggagcctgtggtccgtgtggctctcagagcctctggcttctcatgggaggctgaggacaccggcggagcttccctgaagagactcccagtgaggcatgtgtagacccgggggaccctgcccgcccaggagccgtgtgtagacccgggggggaccctgcccgcccaggagccgtgtgtagacccgggggaccctgcatgcccaggagccgtgtgtagacccggggggaccctgcccgcccaggagccgtgtgtagacccggggggaccctgcccgcccaggagccgtgtgtagacccggggggaccctgcccgcccaggagccgtgtgtagacccggggggaccctgcccgcccaggagccgtgtgtagacccgggggaccctgcatgcccaggagctgtgtgtagacccggggggaccctgcccgcccaggagccgtgtgtaaacccgggggaccctgcccgcccaggagctgtgtatagacccggggggaccctgcccgcccaggagccgtgtgtagacccggggggaccctgcccgcccaggagccgtgtgtagacccggggggaccctgcccgcccagcagccgtgtgtagacccgggggaccctgcatgcccaggagctgtgtgtagaccggcagggcccggcacacacgggaggcgtggctggtgcctctatattacactggtgctgctactgaagatggaccaggcagctgtgagcccnnnnnnnnnnnnnnnnnnnntgattgctgatttccctttgtggcccctctgcgcctgctccttgctcccaggggcaccctgtgccaagtctgcctcaccaagggccgtggctacagcagcactgaggcccggacaggctgcttcccgtcccccacccttctttgtccatctctgaaatgggaagggtgtcgaggcccactctgagtcgggcctagcggcaggtgctttacagacagattctgaaatctggcgaccgtgagcagggcaggtcccgtgggcccatgaagaagctctaggctctctggggtctcccgtgcaggagcctgtggtccgtgtggctctcagagcctctggcttctcatgggaggctgaggacaccggcggagcttccctgaagagactcccagtgaggcatgtgtagacccgggggaccctgcccgcccagcagccgtgtgtagacccggggggaccctgcccgcccagcagccgtgtgtagacccgggggggaccctgcccgcccaggagccgtgtgtagacccgggggggaccctgcccgcccaggagccgtgtgtagacccggggggaccctgcccgcccagcagccgtgtgtagacccgggggaccctgcatgcccaggagctgtgtgtagaccggcagggcccggcacacacgggaggcgtggctggtgcctctatcttcactggtgctgctactgaagatggaccaggcagctgtgagcccctcgtcagtgctggtcctcatggctgtgcccagcccggaatctgtctggtcacatccagcagcatggccagtgcctgcagatgaatgatcatgagagcctcctggtgtggtaactgacagtacctcatttcaccttccggacccatcctgctccacgacgaagtgctacttctgactggagtgcttcgtgcttggcatgctggaggggcttgctgctggcaccggggttctgtatggctggtggcaccggggttctgtatggctgctggcagcctcctggtccctggaaacctgttcagttcacgctgcaccagcatgtatgtccccgcgcgccctggtgtgcaggtgtcctgagcttggagaggctctttggggccagggatgtgtctggggcaggtctggggaatggctcaaagtctgagactgtgtccttagctcactctcctcctctccagccctggaggcggcctctcctgggccccccgcctggggctcctgcgcccgcccttccatcccacacaactggtcccttccctcagccacacctgtcacctctcttgctgtgtggccacaggcaggtgcttcactgcctggtcctcagggtggagagaggaagcggggagcctccctggagtctcacaaagctaagtgagttcgtgtgctgggaagatccaggctgttctgggaagtgattctgggtgagaacaggggcctgatcttcctcagcagccccggggctggttccaggctcgctgcccgttcaccagctcaggtttccctgcgtccagcctcatcctcagtgcgtgccccgaggtgccccccgaggcttctccacagagtggaaggaatcgtgctggccacagcaggtgtcacatggagcaacctttgctttaaatgcctcttgcattggagggaagttgtctaattcagcaagcatttgttgagtgcctcttctaggctgttgtctgagggaacagagaccctgtggctgcgcgtctgtctattcagctgccctaacaggaacaccgcagactgggctgcttaaagtagcagatgttggccgggcgtggtggcttacgcctgtaatcccagcactttgggaagctggggtgggtggaaatcttgagcccaggagttcgagactggcctgggcaacagagtgagacctcgtctctgtttaaaaaaataaaataaaacaaaacccttgcagacatttgttgctcacggttctgcaggctggaagtccaggatcaggaactggccggtctggtgtttgctgaggcttcctggttccagatggcgccctctcactgtgtcctcacatggtgggaggggcgagggagctctggggtcccttttatgagggtgctaatcccccccccgaggctccgcccggtggcctcctcacctccccgggctccctcctaggatttcagcatgagagcgggagcacacagtccatggcatgggcccacctccttcctgctgtgtgagacccggtgggcgctcactgccctgcccagtcctcctactggggggtctctgcctggtccctcagtgcccgatgggcctgccctgcctacggtgatgtccccaccctctgagcacatcttctcacgcccttccaagcaatccctgtgctgctccccctctgaagatgtcttttcagttcagcggagcctcaggccccctgggaattgagctggacccgtgctgctgcccctgcatcgcagacacgctcttccctccctgccttcacggggcctgcaccttcaccatcaccgccaccatcgtccctgtgctgccctgggtgtggcggtggcacgtgcaaagccagtgtgtgctgttgctcaccatgtcatgagtacacacttgttgtttacacagattatccccctgtgatcctggcagcaaacccacaagctggttgtggccccagatactcagacgaggaacaggggcagccaggattagtgacctgcccgtgttggcaccggcagtggtggagagtgctccagggttcacacccaggcaggctgaccccagaccctgtggccagggcagttgcaggggcttcctcatatcaggctgtctgtgaaatccaccaggacaggacccagggctttctggggctccagcgttagcccagggccaggcattcagctggggagtttaaagcatctgccgagtgctgagtggggacaggtgggaggaggatgcttcatcttccctctgtcccctttcccagtgtgaggacccagccttttcagtttttaccagtttgcaaagatcttatgagaagatgctggtgatttaatgtcgttaccttgtaaggatcatctgcattttagaaaaagtagctgagaagatggtttcttcgcccagaaaatagatttctcaggcataatgtctgagccttggttgtagaggatttggatccctgcttctcctccaaaaaacagaagaaaatctcagtgcagagggaaggcgtaagcttgttttctatctgggccagtgccacagtgtgtgagctagcagagcctcagagtgtgtctgatacgtcgtgacctttgtgttattttctctttcagaatgatcttagatattctccaatgttttttccggtaaactttagagggagcttgccaaggttcctgccagtcctcttgcattgccttggtctgcggactgacatgggaaggcaagctggttgcattgtggctcccccagaagccctgtgccctccctgcactgtgggtcctgcccactgcttactagggttattcctgggtggtttagaatctcagtcacctgcatgtcactgctgtctgcacacttgccatatgacccatgggggcatcttttgggcgttgggggcggggatgaggagaaggtgggcacttcagactcagagcagtgaagtcccccgtgcattccactccacgaaacttagatcgagtctataataaccacgagaaaggaaatcggttcatttatcttgaaaaattatgggagtaattctgtataggggaaatatagtaccctcatcctaagtacgaagcattttcctgtgatttaaacttgtcgtgtctctgcagtggccctttctggcttaagctttttctcagctacgtgtatcttccataagctgatcccgttctggccccaggcccacaatggtgtcacctgcccctgcccctgcccctgccgcctgcctccctgacgtagagcccatgccatcctcacatccacctgtcctggagacactgggactttcccttggactgggccgcctgggggcttgtttttgcctgtgattcagccagcagccctggcagacagccttccccaagctcccccagcagagttaacttccacagtgagaggcttcacagggacaggaggtggcctcagatgtcctaaaaaggcagatgtaggattggagctgataggagggagggaggccctttctgtagggagagctttcaaattcaggcttgtttctaagcaggggctctttatccagcatcccagggcaggtgctcagttctccacaaagcgcttgaggctgcatacacatttccgttacttgcacacgtttttctccagagagcagttgccatcttcaaaaggtttctgacacctgttccccttccccagcgttaacaactgctcctattgaggaggcagcctcattgatcccagtgaaggttctggagcccttggaagccacatagagagacaccacccatctggcttcccaacgctcctccgtgagtgtaaatggggctgggtatccagcgtggaagtcagagcagtggcgctctggtggggcaggtgctcaggcacccagcggtgctcgtgaggccagcagtggcgctctggtggggcaggtgctcaggcacccagcggtgctcgtgaggccagcagtggcgctctggtggggcaggtgctcaggcacccagcggtgctcgtgaggccagcagtggcgctctggtggggcaggtgctcaggcacccagcggtgctcgtgaggccagcagtggcgctctggtggggcaggtgctcaggcacccagcggtgctcgtgaggccagcagtggcgctctggtggggcaggtgctcaggcacccagcggtgctcgtgaggccagcagtggcgctctggtggggcaggtgctcaggcacccagcggtgctcgtgaggccagcagtggcgctctggtggggcaggtgctcaggcacccagcggtgctcgtgaggccagcagtggcggccctgggcacgctgcagccctggtggtgaggccccggttcctccaagcacagctgctctggttctgcagcggcctcatcccaggggcggtgcatcaggcgaacattcggccgggacatgccctccggctgggctgtttttttctgaggagaaagcatttcccagctcaggcgcacatctgtgctcacgaggaaatgtctgggtgagccaagggggctgtccatggcccacagcgcctgtgtctcctccaggctggaaaggaagctggagagtggactccacctaagatccccccgaggcctccttaggaagccacagccactccagaagccttcctggtgccagagggtgcagagttgagcggaaaggtggcctctggccaggatgcccagctgtgacctcagcaccctctcatctcttggagacctggagcctctgccccagtcagccccagggagccctgggatgtgagccctcaccttgcagccagggttctgtgaggctctgggcctcagcctcaccacctcccgggcacaggttgcagctgagactcagcgatgccacgtgagttggcgatgaggcggcgggtgcacgcgcatgtggacgccctcactctggcactcagcggcagcctcgttaattagaattgcggtggggggagttacccagctcctcctcttgttattagtttgtggcattagggaaggcccctgggagcacaccctgcatcttcccaaattaaaccgaatgcaaggtctctatttaaaggttatgctgcgctagtgagtttgccacaaggaccattagcatgaatgtttcatgaaggttggggctatgagtggatctggtaggccaggcctgtactccaggagggagggaccttgtaggcagaggaacatggggccagccggcctacactgaggctgggccatgccgaagccgggccacgctggggctgatccatgctgaagccaacctgtgctgaggctgatccatgctgaggctggtccacgctgaggctggtccacgctggggctggtccacgctggggctggtccacgctgaggctggagcgctgccgggacgtctgtgctcgcgctcaggctgctctcccagggtccccacacctgttccagtttgggtctgggcagcgcacatgctgctgtgcgagctccgtcttccagggtgaggcggctcccgccgccgagggctcccagcccgtgcctggctttctgctcccctctccctgtcggccccaccggagatcaacaggttgcttcatctcagtcaaacatacagttgagttccgtaaatgagaccaaaatctgtttctgtgagataaaattgataaacctctagccagactaatcgtaactaagaggacacaaatgaacgctcctgggcgtgagagaagtgacagtggtgccgccattttccacgtttcgttagagccgtcctggcgggtgtgaaattttccacgtttcgttagagccgtcctggcgggtgtggagtggctcccgtggctttgtttgcgttaccctgaggccagtggtcctgaacttcaccctgtgcttatcagccacgcatctgtcttctctggagaagtgtctgccccatccattgcccactttgtaaatgggttgttttgttggttagtggtaagtcttcatgtgttctagacactagacccttctcaggtatgtgatataaggggctcctgtgaggcagcccaggaagggctctcagtcttgctgggcatcagggccttgtcagggaggagatggccatctgtgggccttgggaaggggcatggaggggccaggcacacgtggccctgcctcctgcagcctggtgcgggcacagggtttggccagagagaatgatttccacaggataggctcagtgctaggactgcccggagcacacgcagggcccctggaaggcagccctggccgccgggaatcctgtcctccaggcttttgccgtgggatcacggcccttcccaagaagtctgcctgtggcgctgccctccccagccacgctgtgcgcctgggccaccctggagcgcggccgggtcctccagagagtccgtcagggactgtgctgctgcttcacagccaccgtgacacaggcatgagggagtaaacacagaaaacgaagttttaggtactgagtgctctgtgcctgggccaggcccagagcagtgtcttgtccccaggcctggctttggagggcttccctgccctgtcactgcattggtggggccctgatctgtctgcgctgaagtcttgtaggctgggcgctccacaaagtgcctgggcctcaggtccctgtggtggggatggctgggctgctgtgtgccacctgaacgggggacggccgggctgctgtgtgcgctgcctgatgcagcggcagagttgcccctgggaggtgtgggaggtgagtcttgctctgtgaccattggatgaataatgaatgggccctccgccatgtcaggaagcgttcagcagggccctctccttgtccccagcgccctcttcctggatcccaccttcccacccgtgcttccgcacgctgctccatctacctgctactccttttcttctgggtctcccctccctcacgggcctcctgccgctcctcgcctctcatgggcctgccccgggtgtgagtaggtgttctacaggtcctcggtgaggatgcctcctaggggcctgcctgacttcctgccagctcagcctcctccctaggctgtaggctgccccagagatcggagcttcagacatggtcccgtgcctgggagcccgggtttcccacccagggacaggtggtggtatccccgtcgtcacggtgagggctggaggcacaggtgcctgtgagttacctctgggaacgctgctgccccgggcctgtgccctgccagcgagtcccacaggtcctcacaaggagccctctgcaccctccactctcggctgccgagcccgcaggagaaaagacgtggagccggggctgccgggcggccgtggccctgccgtgcgggcccggcggctgggcgagggcactgcagttggtgccgagagcaccccgggaccatcctcgcatttgctcttcccccacctgcctctccccccctccccgatggctttccttcccttaaatactgatatgtctacacggcttctcaaattggcggacagcagagcagactccggggcttgtgtgctcagcatgggcggctctcttcgcttcatccgggatacttagacccgccccagtacctccccgttccgagctcggccgcacacacgctggacgtgcctgggaagtggccattgccgcgtctgtgcccaccatctgcccacccgtgtgcccgtccaagcaccgactgtgtgccaggttctgtgctggcaatggggccctacatggttaccacgtctcctccagggaacgtcccatccagtggggaggagagtcacgtgcccagtcaccatgtggtgtggtggagtagagggtgcggtcacagaggagtgggggtgggcacttccagctggcaggggaggggtgagggagctgccaggacagattgtggggaaggcggcatttccactggatctaaatggtggatgggagcggggggtgtaggtggaaggtggcccacagacatggatcatgggtctggccctctgtggctactgtcctgtgccatgggcctggagggggatgtaggggtgagagctggcctggcggggaggtgcagggtgggtggaggacctgcagcatggctgggggtgtcgggcacaggctcaagggggcaggcattggctactctgagaatacagttgggagcttacttatgagtctaaggttacacattaaaataaaagggcttgattttttgctctgaacattgtggcacacgtcagcatttcccccttgtttcctggaaatcatctacaaataacaagaagcgtgaaaaccaaaatggcacttaaattttgacaaaacagaaatgcagctgcaaaccaagccccaggcagaggcaggaagcccgtggtgcaggagagtgcagtgagcagacgcagtgagcagacacatccccggggaagcctggagcagtgcgggtggaggcagctccatgagggagccgcggagtagaacccccttgccggcgcgagggagccgcggagtagaacccccttgccggcgcgagggagccgcggagtagaactcccttgccggcgtgagcccttgcgagaggcggcccctgaccctggctccgcagtgcgggggccggcggcagctggaacgggggtccctggactggcgtgtggttccaagctggactggcgtgtggttccaagctgcagcagaggttggtgctgagctgaggggtcacacaggtgcatcacacgtacttgaagccgcatctgtggcagacagaacatttgctcttaggaaaactcacggtgtcctttctctcctgccggagggagctactgggggctgattggactcgcagcaaaactgtcactggatttcagataaaaggaagcaggcctgtccttccccactgtgaacctgtgcacggagccggattcaataaaactcatcttcagcagtgagcagtaaaggttactccatgcatttgtgttagagcaaaggagaaaaagaacaaaaacaagtggcagaaaaagtttcacagaaaaacggtggacattgagcagatgaaaattctatccagacattttgccaagaaacaaaagttaacgaggcggtagagtctgtgaggcttgggcggaacgcacacgctccaagaagagacggtgaggccggggggtgcatgagacaggacccggagggtctcagagcaggagagggggcagtacaggaaggaaggtgaccggatgcacggggaggcgaatcacggggaaaactacctaaagaacccgcagcaagagttccatctcctgaattggaagatgaagtgaatgtggaagcctggaaatgtaagtgctacatgtcatgtattcaaaaagaagtgtcaggatggcagagggaggagagaacatgaggatggcggcttcgctgttgagagccgaagacacagacacaccatctaaaggtagtatcaggtggggagagcagatcgagctgcatgttaggctccctagagcaccaggtgcggtagactggtctatcccgagagagagtgactgtgagggcctcgctcttggccatggagccaggatcccgtggtctgcatctgtgcacagcagacctggaagagcctgtgctgtgcccagtccgctctgcaggcctgagaaccagcggagcctgtggtgaaagccccagtcctgggcggaaaacgggagctgccccgctcaggccaccaggcaggcaagggaggaacggtcgcctcctccagttttcatttcattccggcctcaaggggttggaggaggcctacccatgctgcccggggccgtctgctgagtccccgattcaaatgctgatctcatccacaaaccctcccagacacacccagaaagtgttttgatctgagtaccccaggtcctgtccagtggacacatggaatgaaccgtcacagactataaagttcaacagggaggatgatgtatctgactagttaggcacccaacataggagatacagtaggtactgtctagtaggaaagtatcggtgtgaaacaaagctgagttataaaagcaaccagggtaaaacatgcacacttttctaagcctcgagagaattacacgcaaaaaagtaaactagattaaaaaggccacagaatgagatagatgtaaaagctacaaaatcgaaagcataacaacataatacaacagaaatagacacaaatccagttatagttggactaaactctcctattaaaaggaaaggacttcctgattggattgcaaagcaaaaccaaacatgttggaaagtacgggaagcaaaggcatcctggtgaagtgaacctggaaagcaggagctatgatctccatgcagtgtgagttcaagccagaagccgctcagaaacaaaggtgggcgcttttcacagtgaggttcagatgggttagccaaataacacatcaccgctgttgggaaaagcagaaatgaggaaagattcaaggcgaaattgtcaaagatgccagtagcaggatttatgtcctaatctgcgatatagcaagtgggcaaagaataatggaaaacagaaaaatacatatgtgcgtaaaacccatatcccccaaattagagaatatactcatgttaaaaggagtgcatagaaaacattcacaaagattaattgtgtattcggtaatagagaaagcctttataaattaaaataagtagaactaatacaacttcttgtgattgcagtgtgatgtgaaatcaagaacaaaatcagggaaaaaaaagctcctaacacttggaatttaaaaaacaaaacccaaacagaacaaaacactgtgtcttaaacaattcttggttcaaagaagtacgattcaaaagtgcataagatgtagaaaataattgtcatgaaaacacttctcatcagagcctgtgggaaccacctaaattcacaagtttaaatatttatatcattgaacaagaaagcatgtaaatatatggattagaccttcaacccaagaagtcagagaacaaaaggaaagtaaaccttagtgaaacaaaaaggtaggaatttgtaaagatcaaagcagaagttaataggaaagtgaaaaatggtagaaataataaataagtccaaatacctgttatttgaaataaaaccaataaaacatatgaattattcacagttctaataaaaaattgatagaaagtatcaccatccaaaataggaaacaagactaattacctggagctattgactgagcaggagcatgcgagagctttcaggcgtgctgagaattctgtgtcctgatctggacggtggatacgtaggtgaagacatgtataaaaagccatcaggctgtgcacataagattgagaagtttactgcgtgtaaattatgtatacctcgatgggaaagaaaagcaaaaattaaaaaattgagaattatgagttttgtctgatttctataaaaagaattatgaattatatctcagttccattttaataaacttaaaaatctgtgggaaatgaatgacgttttagggaaatgttacctatcaatcccaactccagaagagagagaaattttaaacagatcaattactgtagaaaaacgttgtcccaaaattgccatggctgctctcccccaccacaagaggaaagaaacagaagatgcatcaggccaagccagtttcatgggaaaattctaccagatcttcaaagcgcagatactttgagcactgtgtaaaccagttcagactgtgggaaaaggaggggaaggcattctggaagtgttgtattgacaccaacaactgcaaaggccttacaagcctgtgtgtgtgtgtgtgtgtgtgtgtgtgtgtgtgcgcgcgcgcgcgcgcgcgcgcgtctgtgggtgtgtgtgcgtgtgtgcacgtgtgtgtgtgtgcatgcacgcgcatacgtgtatcagtgtcattgttaacatgtcacgagtgaaattcaacagcaggttgaaatacatcatatgcagtaagatttattccaggaccagcctgtcagcttgattttaggatatcaatttatagaataccctcttcatgggggcgtttgacaaaatccaacactcagccttgattaaaaactcttaataaaataggaatatatgggtaatttctcactgtgatagaaaatacctatttgaaaaaaaaggtcatgtgctgtaaataagaaagtattggcttcagctccagtgaagccacaggccacctaaggatgtccagtatcacaactgtgatttcgtattattctggagatactagtcatccaaagtagacaagggaaagaaacccaaggtatcaatattgggaaggaggaggaaaattggaaaatcgtccctctttgctgctgataagattatgtgccaagagaatcaactgagaactgctgctgtcggtcggaatttagtgaagggggcgggaaacaaaaatttaaaatcacgtatacaaagataagttagaaagaagaagaaaaggctgggcgcggcggctcacgcctgtaatcccagcactctgggaggctgaggcaggtggatcacttgaggtcaggagatcgggaccagcctcaccaacatggtgaaaccccgtctctactaaaaatacaaaaattagctgggcttgatggcgtgcacctgtaatcccagcaacttgggaggctgaggcaggagaatcgcttgaacctgggagctgcagtgagctgagatgacaccactgcactcgagcctgggtgacacagcgagactctgtctcagaatatatatgtatatttatgtatatatttttatattttatatatatagtgaaaaaaagcaaggtaccaaatgatgtgtaggacatcttaccatttttgttaaataaaatgaagtgtggtgggaggaagaacatagacatgttgctggcatgcgcaccagcagcctccggaaggaacatatgctcaaacctcagaacgttggctggctgagagtcgggggcctggggcgctggggttggaagttggggacaggctgctcagggcatgggcatccgtgtttgttgtctgaactgtggatctttctttttaatggacccatgataattgtatatatttatggggtacatagtgatgtttcagtacatgtaacatatggtgattagatcagggtaattagcatatcctgccctgttgcacactgtgcaccccctgccccagtgccttttttcccaggctcctgctggcccccagcccagggggtgttgtccccctcgcatcattccaccctgggtgtctggcaggctttgcagcttcactgctgggggcctccggctgccgtggtacctgctggcacctgtccttccctccctgaggccacactgcccttcctcctcccttcgtgacggagtgagctgggctttggagtgggtcaggactggtgggaacaaggttctgacttgggccaggggcaggatttacctccctgaacccatcggatcctgtccatgagacaccccaggagtggtgaggggcgtctctgggtgggccttccttagcacccccgggccctggagctggtgcctacgtagcccctcagcctgcgccagcctgcctgaccaggcccccgtctgtgccctgctcttccttgagcccgcagtccgttctggctcctggcctccccaccgtctgctgcccctgatgcctcccaccctaggtgtgtaggggcgagttagaatccacactcctggccgggcacaccggctcacgcttgtcatcccagcactttgggaggcggaggcgggtgaatcacccgaggtcaggagttcgagaccagcctggagaacacagtgaaaccccatctctactaaaatacaaaaaattaaccaggcgtggcagcacgcgcctgtagtcccagctactcaggaggctgaggcagaagaatcacttgaacctgcgaggtggaggttgcagtgagccgagattgtgccactgcactccagcctgggtgacagagcgagactccatctcagaaaagaaaaacagaatccaggctccctcccgggcggtgcagcatctcacgctgttctgtagaggaattggaagtagcggaataaacgacggcttgtggctgttaaaccaaaccgacggcagcgttggagcgtgctctctccccagctgcgtgtccactctccagagactctcacatgcaccccacacacctcaccgtgagcctgtgcatctgttgctattcaggagatggaagtgacaaaaaaatgagagaacttgagtttgcaaagttagagtgctgtctggcctggcagcttcaggcttccaggagagaggtctctcccgcagctcccagcccagggcgggggtgctgccaggggtggtctcaggggcctgggctggggttccccacacacctgggtgcgctcgtgtctgctgaccctctatcctttgctttctcctagctggagatggagctgaagatgctgaagtctcagtccagctctgccgaacagagcttcctgttctccagggaggaggcggacacgctcaggtacgtcccccagagaggaggcggacacgcccaggtgtgtcccccagagaggaggcggatacgcccaggtgtgtcctgcgggggaggaggcagatacgcccaggtgtgtcctgtgggggaggaggcggatacgcccaggtgtgtcccacggaggaagaggcggacgtgctcaggtgtgtcctgtggggtggggggaggtgggcacgctcatgcgtgtcccccaggaaggaagtggacatgctcaggcgtgtcccccagcggggaggtgcgcacgctcaggtgtgccctttccagaggaggggagtgcgggagacacgtccaccggcagcctcctgtccccctctccaggccgtgaccttctctgtgtgctcccccgtgggtggctggagtaaagtcttgctcctctgctgccttcctggaagggcttttctttgtaagtcccatcccatccacctaggttcctctctgcagggacactcgtctctgctggtgtggccctttcttcagcagcacttctccagccagcactgacagcaggggtctctcagtgtccctgacgctcagaagggagcaggtcctccatcagggggcggcgctggagccgggtctgcagccgcaggggctgcatggcagtgctgtgccgagatggctgcacgggagtgtggctcagagcagagcccaggcagtgcagcagccaggcgtgtccagcagcccttgggctccgcttcagacatgctgccagctctctgccactgcactgtcctaggccaccctcaccccagctcctgcttgcacacggcgcccctagagcagggtctgcaggccgggctgcttttctagagctctctgcctctcccccgccttgtggacccatcagggtcctcaggcaagaggtttccaggcagatgcaggtggagctccgggctccgctttggtgcctgtgttggcgctgccccatccagtgcggattgaaagtggctgtggggcaacccgagtatcctgccagaatccaatgtgggaggcggtggctgtgggcacagggtggggtggcaggaggcccatggctttcctgcattggccactcctctgctctgagtgtctgcagcaggccaggccctgggcatccagggtttctcctggtcatcagaggaactgagaacaggggactgagacagctccaggggacatcaaatggccctgcagtgagatgggggtggcagtggggagagagcacccttcctaggccacacagctttggtgtgtgggcccctggaccccccgcggcagcagcctctgcttcgtccgtcacacccactccctggggttccagttttcacctgtggatggcccctctttctcagggttgccgagagtaaagcaggaaaagggctgcctttagtgtggccccggcccaggaagtgctctgcacatggcagctatgatgccttctagattcgatgttcctccagcgtctctgaagcattcctcatgcatgggctgtgccttacacatcgccctctctgggatctgccggagtctgagcggtttcatttacatctgctcagccgttcaagtgttcagatactgagtgtgtgccgtggcgtccttagggccgagcatggaggctgatggagtggtgagtgggccccgacgcgctctccgtcttcatatgcgtctccatgtctcggggacctgggggccattcttcacctagaggctctgtcgttacagcctgtgaggtgcacgtggtcctgtgacagtggatgtctccccctggaagtgcgtctgcgtgtggtcttcgggttgatggggttgggggctgtgtgtgagtgtgggtgtggggtgggggaagctggagaccgggcaggtgccatggtgagcatgcagtctctttcctagcagcaatgggaggcactagaggctttaaagtggaagaatgtgactggagaaagcactggctgccaggcctggggaggggaaggagagtggcagaggggccgtccccaccacctgctcaccaagcattggtgctgggagcccctccgaagccagagttggcttttcctttgcagagatgagcaaaatatgcctcccacacacaccctgacttgcaagagcagccccacctggggagaaagacccttgccacacagagcagcgggcctggaggcctcggagagggggtagtgtgtagtgagacagaaggaatggcccagaagggcagcccaggcaggtcaggagctcaccaaggccaaggctggatgacgtgccagacaggcttcaatgtgtgtctgcagtgagagggggagctgggaccagcagcagaggccacaccttgtcatcatggagaaagggcctctggaggcacgcgggcgcagggggagaggccgtgcacagcagcgcatcgggaaggtctgggctggtgtggctggtgcctgaccctgcaaggtcctgaatgccacgcgaggcagggtggtctccaccgttgtcctccagtccccaggagccacgtgggaggtggtggagtaggttcttaaatctggggagttgcagctgtggcttccagcatctgtgaaggtttcaggaaggtcagcgtgtcccggcccgtggctgcccacgcaggagcctgcgtcacgctgcacagctccccgctctctgagatggcactctgctttctgctgggccttttggcacctagaacctctcgttctgcagttgatgggagcatggccaggcgtgtgtcagatttgtgtgggctggcatgcttggggtttattcatttttacaatttaagaaaaggcctttatcattgatatcttttacatcaaggtcaaagcttctcgtccccaccattttgtttggagcccttcagcctgccactgcactgtgggagcccctctctgggctggccgaggccggagccggctccctctgcttgcggggaggtgtggagggagaggcgcaggcaggaactggggttgcgtgcgtggtgctcacaggccagtgcgagttctgggtgggcgtgggcttggcaggccccacactccgagcagctggccagcgttgccggccccgggcagtgaggggcttagcacctgggccagcagctgcggagggtgcactgggtcccccagcactgctggcccatctgcgctgcagtcgaattctcactgggcctcagccgcctccccgtggggcagcgcttgggacctgcagcccgccatgcctgagcccacacccacccccagccgtgggctcccacgcagcccagcctccccgacggcgcggccccctgctctgcggcgcctggtcctattgaccacccaagggctgaggagtgcaggcgtgtgacgtgggactggcaggcagctctgcccccagcccggcgtgggatccactgtcggaagccagctgggctcctgagtccggtggggacttggagaaattttatgtctagatagaggattgtaaatgcaccaatcagcaatctgtgtctagctaaaggtttgtaaacgcaccagtcagtgctctgtgtctaggtaatctggtggggacttggagagcttttatgtctagctaaaggattgtaaatacaccaatcagcaccctgtgtctagctcaaggttcgtaaattcaccagtcagcactctgtgtctacctcaaggtttgtaaatgcaccaatcagcactctgtgtctagctaaaggtttgtaaacgcaccagtcagcaccgtgtcaaaacagaccaatcagctttctgtaaaatgggccaatcagcaggagtgggtggagccagataagggaataaaagcaggctgccagagctagcagcggcaacccgctggggtccccttccacgctgtgggagctttgttctttcactcttcgcagtaaatcttgctgctgctcactctttgggtccgcactgctttatgagatgtagcactcaccacgaaggtctgcagcttcactcctgaggccggcaagaccacgaacccactgggaggaacgaacaactccagacgtgctgccttaagagctgtaacactcaccatgaaggtctgcagcttcactcctgaagccagcaagaccacgaacccaccagaagaaagaaactccaaacatgtccgaacatcggaaggaacaaactccagacacaccatctttaagaactgtaacactcaccatgagggtccacggtttcattcttgaagtcagtgagaccaagaacccaccaatctcggacacaggaggaccagggatggtcctcacacacacatgcacagccacacatgtgtgcctgctcttgcccagatgcacactcacattttcacatccatttatttgttgtatgtgaatgacatgtatcacatagcatcgtttttcaacactgaagctagagagagcgtcggtggggatttttaagaggcagcagctgaggagccctttcagccagaacaaatctgagcccgtcctctctgctgtcaaatagcagctctagcaaatcctaaatgttgcctgtagattcagcaactggttagacgcttgctaattccagaggcttgcctatctgtgccagtgcctgctagtcacactcggaccctcgcttcccggccgtgtgatgtcttctgggtcccgggaggtgctgggggccctggagacgccggcctgcctcaggggacgagaggtgacccatgaccccactcacccgaggtccccactcttcaggacactctgtgatctccactcacaccccagggacccagtgcccaggcccacgtcctttccagagggccaggtgctagacttttaatgttcttttgtagaaattatcatctttcatccaacaaatctccattaaacaccgctgctctaagtcccctcatgaaactacatagaggtaactggaaagacagtccctgcctgccaagcttctagggcagtgggttgatctttgagctcaccgtgcccagcccaggccgccagggagagttcagcctgggaaagtggaactggttttccctggttctgtcctgttctgcagccgctcctgctgcccaccgtggagaacctgctggctgggccgggtctggagtacaagtgattggtcccattggaagggcagctgtggctggaaagaggtcaccctcagatgctatggtcccaggtgggaaggcgtggccccgagggggcctggtgatggactgcccagcccatctggggatcaggagcccagggcaggacctggggagcctttgtggcctcattctccctcccccgagcagcttcaggagcaggctgaggcagccaggtcaacagggtgaaggctggtgagctgcctccacctggctgggcagcactgtcagcaggcccgtgaccaccagagctgtccccagcccactgcctggctgccggtagcgacagcggcccctgcgcctgggctctgcaggtggtgccggtgaccacagccagtgaaggcaggtgcgctccccaggtccggcctgcagcttgggtcctcagggccctgcctgcctgggtcctgtaccccggacctgcttctttctctccgaaagcctgcccacctcccctggtcccctggtccccagcatcctcaggttacccgaacactctggccggggcctgctctgtgcgctgcattgggcactccaggcctttccttctggcgtctcacgcccttctgctcttgagagctttcctggctctgttcactgatcatttcctctcctctgttttctgtgtcttctttctgaaactgttacttggatgttggattttcgaatagttttctctctcttaaatctttttgatcctattttccttatttttgtcctaccttctgtattttctcagctttgttaacctgttcttattttatttgttgctatactcttcgtttcctgagagtctgtttctgttctctgaggattcttttatgtataaagcatcctgtcagtgttcatgagtgcagtggggtcactgtgtctttgatgttaataatagtgctttttggagttttcttctcctagtgaaccctgttctctgttgctctaagttgctgtttttctgccagtgttggaccttactcttttctttctggatgatttccttaagcgtttggtggtcccagctgcctgtgccagggtgggtttgccctgtgcttctccgaggaatccggctgggtcttccactggggagcccttgggaggggcctctgatctttcctctccagcctgggtgactctggcttgggggcctgtgctgccagctcctgggggctgagcagggaagtgtgtcgccaatgcaggactcctcttgcggtggggcaccctgtccgtgccttacctaagggcctgtctcagcccggagatcttatgcaggatgtgcagagtgacatgcaggctcctgcccttcactcccagaagcagaagccagcagagtgccctgtccccgcccagcagcatcagcgtggcccctcggggagcgcgtctcctgccccagccttcagcagccggcactgctcctgtgtctgtgctgggcagggtcagcagggctgatggcagggaccttggtgccattcagcagaggcaggcccagctctggctctctggtccagtagtgttgccatgcccaacagggatcggagcctacacctcacccagcaccgaggcagagcaggatgtggaggggggtcttcaacccccaggaccccatgtcagaggctcagcagggccttccccacaccctgcagcagggaggctgccgctgcccttcatgcctcctgtccgtggtggtggcgagacaggcaggggcccagctcgcacccccctgtctgtggtcctcgtgtgtggggtacacattcccgctctaggggctgagctcgtacccagctgtctgcggccctcgtgagcaggtacacattccccactgtaggggcccagctcgcatccacccgtccgtggccctcgtgagtggggtacgcatccccactctaggggcccagttcacacctgcctgtctgtcgcccttgtgagcaggtgcacgtccgcactccgcgtgtaccaggatggtgtccgccaggtctgtgcggtggcagaactcccactctgcccccaggtctggcactcctagatgtacacaagccaaataacagttagaaaacccaggacgcagaagtgtctgggatgaacagagaatcgggcagatctacatttacagttgagaactcacacctcagcctccacgactgacggaactgagtgtcctcatcagcccgcaggacctaatcagtgtctgtggaacaccctgtccgagagcagaggactcttgcctctgcattcacctgggacagtcacaacagatcacatcacgggtcatcaaagagaccccagtaaattcgaaagaatcgaattcactcagactgtgtgctctgagtgtaatgaacccaaactagatgtcagtaacagaagaacaacagggaagtctctaagcattaggagattagcaacacatgtctgcattgcccgtgtgggggaggaggtctcccggtacaaataagtacactgggcaataatggaaatacacacatctaagtaagtggggtccagctagaccggtgctgagaaggaagtacgtcatgctcagtgttcacgttgagaaagaggaatggtctcttaatttatgttcctatctcaataacctggagaaaggagagtggaatagcccagagcaagcatggatgaaggaaataacatgagcaaaaagcaatgaaattaaaaaaaaaatagagaaaattattaaaacaataagttctggcttttttggaaaaaaaaattcaataaaattgacaaatctctagcaaatttgacaaaaataaaaagacaccaccaaaatcatcaatatcagcaatgaaataggggccatcactacaggccctgtagccattaagcagagggtgttatgccacaaacaacttgaagcagcggactcactcctcagaacccacaagccaccagactcgaccaagatgaaataggttatctgaataatcttgtaaactatttttttaaaaaaaattgaagtcataaagatgcgaaggatatccctaggcccaaatggtttccctagagaaatctaccaaacagttaataattaagatcaatttgacacagaaaattgaagagattgctagggtttaggcacgggggtgcatgtgtgtacaaaaggacagcggggcgagccttccggtgtcaggacaggcctgtgtctggatggcagttgtgggcgcacacatccacacatatgacagatcacgtgggagtagacatggagggaagtgtctgtgagctggcggcaggcgagcagtctctggattgtacccatgttagttgtcccgtttttgatattgctgtttaagttgttaccatcgagggagattgggtaaagaggacacggacctccttgtacgtttcccacaaattgctgtgaatctgtgatgaggtcttcattctgttttaaaggtctccagccagccctgcagttccagcgctccctcctccctgcttccggaaattgttgctggggtgggtatccctgaacctggggagcttgtggtgtcaaagcttcttggctgttccattgctggcgtgggattcagcttttctggggtcgtttgccactcatctgtctggaagctttccagcttccattttaaaggctatttgatgctgtgccttcttttctttgtcttcaggtaaatgcctcaaaaaaagtaagcaaaacctttacccttgttttaccgggattttgagagagattacacttaagtgcacgtgttcaagctaccgtctttaactgaagtctttgatgatttttccgtttatataatatatattttaagtgaaacacacatcatttgcatcctgtttctccactatatattataacataaacacttccccatgtttttataggtttttgtaagtcttaatgtatagttgattaaccccttttggagcttgagtggtttcgcgttttcacctagtgagaatgaaggtgaactgttggccatgttttgacttctgtgcgagagaattctgtgtgtctggaaagaccaactgtagcctgtaggagcctggctgcactgagaaatcccatcgcttgtgtttcttactggtgacggcaacagcccccagcagcagcggtggccatgattgcagtgagaggcaagtgatgtttgtgcggggctcactgtgggccccgcatggcactgcgtgcatctccacgttgatcgagttctaactgcgggcctgagacggggtttaaggatattcactgtattgaggtggaactcgcacaccgaagggctggctgtgggccccgggtggcactgcatgcatctccacactactgaattctaactgcaggcctgagaaggagtttaaggatatctactgtattagcgcaactcgcacacaatggaagggattcatttaaacctgagttcatggtcggcgagtaccaagggcgggcggtggtacccttatccggggagcaggtcatagaggctacattatcttcagagttttaaaacaataagtaaataaaagtggatgcacttcttaccaccacatgcctgcagttctaaagaatgccagcaatgatctacaattctaccaccattcccccaccagatgccaccgtcacgtctcaatagatgtatgcacaagcatgcagccaccacagtaagatataggacacagcccagcaggtgtttaaattttttacttttaaaattatataataggctgggcatggtggctcacgccttttatctcagcactttgaaagaccaaggccggcagatcacctgaggtcaggagattgagaccagcctggccaacatagcgaaaccccgtctctactaaaaatggaaaacttagctgggcgtggtggcgcgtgcctgtaattccagctacttgggaggttgagacacgaggatcacttgaacctgggaggtggaggttgcagtgagccgagatcgtgccactgcactccaacctgggtaacagagtgagactgtctcaaaaaaaaaaaaaaaaaaaaaagtaaaaattaaaattatatagtaaaattaacttttttcttataggatacagctctatgaactctaatcaccctgtaatcagagtgcaaaataacatcaacccttcaggaatcctccatggtccccctttccattcacccagccacacagggacctcccggcagctgcacatgtctgctcaactctgcggctcggctttttccagcccagtcctacaacatgcagtcttttgagactggctcctttcattcagcacaacgccctcgagcgagatccatccaggttgtttgtgtataaaagtcagttcctttttcacttaggtagctttctcataaattttgaggtcaggagctatgagtctccctggtggtggttctttttcagggggtttgactccgctgacgggtaaacagtgggcagtcttcttctccctgacacagatggctttacatttacttaggttttcttccatttcttttagcaatgtttggcagtttttagggtacaaatcttatgcctccttgggtaaatgtattgcagagtgttttgttctttttgatgctgttatgaatggaattgttttcttgatttccttgtcagattgcttgttcctaatacagggaaatacaactgatcttttgtgtgttgactttgtattttgcaactttgctgattttgtttattgactagaacaggttatttgcagcttctttagggttttctgtagcctggcatctgcaaagagagagaagtagtttcactttttcttttccaatttggatacaatttatttctttttcttgactaattgttctggctatgttgaatagaagcagcaaaagcagacattcttgtcttgttcctgatttaggggaaaagcttttagcctttcaccattgagattgacataagctataggttttttgttttatttatttatttattatttttgaggtggagtttcgctctgtcacccaggctggagtgtagtggcaccatcttggctcactgcaacctctgcctcccgggttcaagtgaatcctgcctcagcctcccgagtagctgtgattacaatcatgtgccaccatgcctggctaatttttgtatttttaatacagatggggtttcatcacgttggccaggctggtcttaaactgctgacctcaggtgatccactcacctcggcctcccaaagtgctgggattacaggcgggagccaccacacctggccaacagtcgattttttgaaaagatggaattgccacactgtttaccagattcaataggcaagttgcggaaattggacggagagttctcataccctcttcacccggtttctctcgctgttgacatctcacgctgccatggtgctcgtcaccggcgtgtgactctgggcctgtctccagcccttgtttggatccaccaggctttcctgcatgttgcagccagggcaccgtgttgattttagtcgtcacatctcttctgccgctggtcggtgacagttttgtctttcctcgcttctcctgacctcagtatgtttaggagtccctagaacgcccccgaagcgagcttgtgtgatgtgtttcattgttaacctgagatggtggtttttggaaggaagatcacagacgacaagtcctttctcaccacgtcccatcagggagcccctgacatccacgcaacagcaggtggacctgaccgctggactgaggcgttgacagcggacctgactgccggactgaggcgtggacagtggacctgaccgctggactgaggcgttgatggtggacatgaccgctggcattgacggtggacctgaccgccggactgaggcatggacagtggacctgaccgctggactgaggcattgatggtggacatgactgctggcgttgacggtggacctgatcgccggactgaggcatggacagtggacctgaccgctggactgaggcattgacagtggacctgaccactggactgaggtgtggacggttgacctgaccaccagactgaggcgttgacagtggacctgaccgctggactgaggcgttgatgtggacaagaccgctggtgttgacggtggacctgaccgccggactgaggcgtcgacggcggacctgaccgccggattgaggcgtgctctgccgggtgcctcgtccgcgaagctgtttgcactttctccagtctcttccttggaagcgaatccctcagggcacaggcgacgctccccctctggagggatgagttctacatgtatgatgtggagttctgtgagggaggtgtctcctcttccccatttattcacttcttcatttattaccagcagtgtggactggagggagtttgccacgtgctctgtgttctgatctggtgcacgcaccaggacttgtttattaccagcagtgtggactggagggagtttcccgcgtgctctgtgttctgatctggtgcacgcaccggaacttgtttattgccagcagtgtggactggagggtgtttgccgcgtgctctgtgttctgatccggtgcatgcagcgggacttgtttcgctgcgtgatctccccgcggccggccgcgccctgctgtgccccgtcattgggttttctgagcccttcctcactctctggcaccacagggtgctccagactcacctcgtgtcctctgccccagctttccaatcatccgttcctccagggagcccggagccttctcttggcagcacagtcctgagcagcccaggtcagggtctgggtatgcctgtggctcctgggacggcactgcttctacaccctcccgccagctgcctttaccgtagtgtttgcgtgctgtaaatatttctgtccttttacttgcagtgtacctgtacccgttctttgagtttctgtatacatgatgtcatcgggtcagtttctaaaccatcatggcaatctctgtcttttcattgctaccattttattatttgtttgtgtgtctcctccatttttgtttttccttttcatgcttcctgctttctgttgagttacttgaatggtttttagtatttcattttaatttagcagatgggcatctgactatttctcagtctgatgttttgagtgtttgctctgggaattagagtacttatcactgcctactgagaatcagcctcatcccacttgaagtcacacctggaagcccctcccggcaggtcccttgccctctcccttcctgctgtccctctacctacatggaaatgccacaggttttgttttcagtcatacagtgttttgaaaagggcagtaagagacccgggtattatctgtaagcccagatagctgccatctgttcctccttcattgtcgatgctccaggtatccttcatgtcctctttccttctgaaggatttccggcagcctctcctggagagcaggtggctacgattcctcacggtttccctcgggtgggtccgtctttattcctctcgtgttcctgaaggagctctgccctgcgcacgcagcgcggcccgcggccctcgcctcccagcacgccacgattgcggcgttcctcctcctcaccgcggttcctgcctggggagagatttgcagacgctcgaatcgctgttccctttgaggtcacacagtttttttctgttttcaccattttttttgccttcagttttcagcagtttcgtttggatgtgtctgggtgtggatttctttgggtttattctgtttggagtttgctcagcttcttgaatctctaaggattttttttttttttttttttttttgccaagtttgggatatttcagccatttatttccttaaatactttttcagcaattcacttttctgtgaatttgctgagacctttgggtttccgtgtgctgtgagagcgtgcacactcgtctgcatgggccgtcttgtggcccctctccgccgcacttcccagataacccagccccatctcctcagccccggcagctggaactgcctctctccaggctgacttgaaatctctgtggttcttcatgtgccgagtaatttggggttatgtcctgagcattgtgagaagaggttttgtgtttaagtcctgtgagaaatgagagtgttttagtttagcagtgagccgacctgggtggtttctagcccaggtcccagcgaccttctgtggggcgcggttcccatcccagttcaggttgtgaagccttggcagcgctcctggccttggcctgggacattggcagtgcctgtcagcttagctatcatcagcttcagaggccagtgtggatgggacccaggcacaggccaacccagggacgccctcagctctcaccggcttcagatgccagtgtggatgggacccaggcatgggccgacccagggatgccccccaactctccaggactacgcttttcagtccttccattctgtgatcttcgggtcctttcacgtttctgggtctcccctttgtggtcctccagggacgtggggctctcttcgcaccgtctgttgcactttgctggtgtcatggaggttgggcccacgcccggccctgcaggagggaggacagggaggaaaacgcagctagagtttgtcctgcccatctggaacgacagcagcttcagacagagagcacggctcctgcctcaggctccctgccgccactgcagccctgtgggctgagcccgtggtagtgtgcgaagagcagaggcaggggccacgggggccggggagtccatactccgagcagggagggtcccacgctcctgaagctcagtggctttcttttccggcccccaggtgagtgctggaggacttcgccttgagctcctggtacagcagcctcaccactgcctggatggtggcacgaggttgaggtcaggggatgcgagagaagagccacgatgttccctacccaccagtgcggtgggccttccagagccgggcacgtgtccaggcattgtagccctgtctgtgggagaggaagggcaggcgtgggcacccgtcacactgccatgtctgcgcggctttgtcacgtgctctctttatgacaaacaagcctggaggggcgaggtgctccgtgtcaggacacgcagcgagtgttgggttaagctgggccccacccacccttgtgtgaccatctccagggctgggggtcctacgtaccccactcgccagcctctctggtggggttcccacacccgttgttcaagggaaatggtcatcaatgcctgctgtgagccagacaccatgatcagggctggaaacgtggagctagccatttgatgaaggggacagagaagtaaaatgtgaagtgtggtggtcaaggcccactggggaggggctggcgggcagtgcaggggtctgggacccgtgggaggctggcctgggtgaggggcttcctggactggatgctgtctgcccgttgggcctcgggtctccctactgtcccctctccaggccccaggagcctcacctgcggcacccaggcctcccgcccccattatgcatcttttagttcagcaaaaacaactaatcatttttcttgcaaaagtttcccccgtgtgtgatgggtttgttataagcaagaacccggctaccctccacctgctttccacgcacacgctcggagacaggcacctgctttgattggcgtcatcttctcgaggaaagatctaggctggcagctaatttatgtagcgctcctcgtgtttaaaaaagttgcagtaagtcaatttcaagaagcttatgccagaactgattgctttgagccatttgaaggcaaaccagaattctgagcttttgagcaccatccccccaacttgtttattcgtttgttctctttctcgctctctgtgcggtagcagtttgtctgaaaggagggcagcagaagaaagcgcaccccttcggtgcacaaatgagcccgcatgtgggcttgctgtctggcggcgagggtgggtcacgcaggtcattctgttaacatggctgcagctacacgcgtgcgctcattccaattcagcccttgaaagcattttgctcccaagccttcagaatccataatatcattttaaaaggggccttttcatccagcgtctccctaagtcaagaagcccctgcagaaggcagcttctcggagatggccttggaggcccccaccatgtcgtcactcatcaccttgggcaggttcactcccctatgaagccctgggaggcgagggtcaggaacacccaccctgggccctcggccaggccccttaccggctctgtgatcaggggcctctcagatggctttctgagcctcagtctcccctttactcaggcaccaggacttccctgctagattgatgtgaagactgagggggttgtttgtaaagccacagcacttgcggggctcccaaaacctctccaggaggcatcagctggtgccggaggtgtgtgctaggtctcacactgcacggccaccctgccgagagacggtgacactgggctgtgctcagatgtctcccctgccggcgctccctgcctcaagaggagcgaagcattgttgctgcagaaataccttctaggcccatgctcaggatgttggtgtgagtgggagtgccccagacacccagggagggcagcgcacggcgtctgctgggatgacagagacgcttgcccctggccagcagcctcgcctccggaagcatgtcctgcaggtgcgccgtacaagcaggaagcagatgtcagaggtcattcactacagtatggtttttacagctttcctgaggtataactggtgtgcagtaagctgcgcgatgtcaagtgcagtgtggtgaatttgcatgtacacacacatacacccatggagccgttaccacattcatattcaagacccccagacatgtgctcttgtttgacaggaatccctcctccctgcctcctctccccaccccaaacccgccgacgtgctttccatcactgtagattggcgggcggctgtcgagtcttctgggcatggcgttggtcctggagcatgtggtctccctctttttgcttcttccacgcagcatggctggttgggggagagatcactgtgcacacagctgtgttgtcttcactgctgagttgtgttctgtcgtatggagacaccagtttatacgttcccttgcgatggacatttggagtttttctggtttttggctattctgaaactgctggatattataaataaagtcccatgtagaaatcgacttcgttttctttcaggtagacgcctagtgtggagtggctggcggtcacgtgtgtaacgtgttccgaggttgcccgtcttccagagtagttggtgtgcagcttctcctcaccagcatgcagcacagtctttttccttagtccctcttttatttttttaaatgtttcttttacagacagggtcttgctctgttgcccaggctggagtgcagtggtgggatcatagctgcctgcagcctctgactcctgggctcaagtgatcctcccaccccagcctcctgagtagctgggactacaggtgtgcaccaccacacccggctagttttttaaaggttttcatttaggctttctaataggttggcagtcatgtctcactgtggccttttattttttatttcacaaatgactaatgatgttgaacatcttttcattcagctcacttgtcatctgtagatcttctttggtaaagcacctgtttttttgtccattttaaaatttgattatttttcttactgttgagtttgggagagctctttatatgttctggatacaaggcctttatcagattatttgctttccaaatattttctcccagtctgtgtcttgtcttttcgttctttcatcaggtattttgaagagaagtttttttatgataaagtccaatttttcaatgttttctgttatatatgatcctttggatattagtccattttcatgctgctgataaagacatacccggactgagtaatttataaagaaaaagagattgaatggactcacagttctacatggctggggaggcctcacaatcatggcagcaggcaaaaggcacatcttacatggtggcagacaagagagaatgagagccaagccaaaggggaaaccccttataaaatcagatcttgtgagacttattcacgaccacgagaatggtatgtgggaaaccatccctgtgattcattatctcccaccgtgtccttcccacaatacatgagaatggtatgggggaaaccgccctatgattcattatctcccaccacatcactcccacaacacgtgagaacggtatgggggaaaccgccctgtgattcattatctcccaccacaggcctcccacaacacacgagaatggtatgggggaaaccaccctgtgattcattatctcccaccacgtccctgccacaacacacgagaatggtatgggggaaaccgccctgtgattcattatctcccaccatgtccctcccacaacacacgagaatggtatgggggaaaccgccctgtgattcattatatcccaccatgtccctcccacaacacacgagaatggtatgggggaaactgccctctgattcattatctcccaccatatccctcccgcaacacatggggattatgggagctacaattcaagatgagatttgggtggggacacagccaaaccctatcaggtatcatagctaagaaatctttggctgtcccaaattcacaagattttctcctgtattttcttttaataactttgtaacttttggttcaggattgagcaggattttcatttattgtacaagattttaattctttatttcccccaagaacacccagttgttccagaaccatttgttgaagagtttgtcctttctacgctgaattgccttcatatatttttcaaaaattggttgtgtttgtgctcctatttctggactctgttttgtttgatcggtctgtctgtcttgcagaccagtactgcactgttgtgattactacggctttaacgtagttggtgaaattaggtagcccctcctttttcattgtcaatgttgttttctctattctaggtccattacatctccatatgaattttagaatcagcttgccaatttgtacaaagaagcctgtgggattttgactgaggttgctgattctgtggattaatttgggggagaagtgcgttcccaacacccagagtctcccagcctgtggacaaggcctctctctctccctgtgtggaggttgccctggagctctcttcacagtgctcggagcttgtcatgtgcaggtttttcttggcctgttccgttccatctctgtgtatttcatggtgttggatgcttttgtcagtagtattttccagatgactttctggtgctgattgctagtttaattccatgatggtcctataacatagttagaattatgaaattcctaaatagactgagccttcttttatggtttagcatgaggtcttcttggtacatagttcaagtgctcctgaaaagactgggtctcctgctcttaagagtcgaagcatttatccaggtgaaataggtcaagttggctgatcatgtggtccttgtcctcctgatattttgcccgttgttctatcagctattgagagagggatactgaagtctcagattgtcattgaggacccgtctatttctccctgcatttctggctggttttgcttcatttgttttgcagctcttttattagcacacacatgtttaggattattattttcctttgattaatcaatctctttattattataagttaccttcttggtaataatatgtgctctgaaatttactatttctggtattagtagcgtctctggctttctcttgctggttttcttagtgatggcatgttatgtctttttgcatctttgtatttaaagtgcattattgtcagcggtgtctgattgggtgttgctttttaatccagtttgagtgtctgccttttaattgtggtagttaggctacttacatctaatttgtttatgatataattagttttgatcttgtcatttgactgttttctactcatctgtctcttcttcatttctgtttccttttttttttttctttttaccttttttcaatccactttggtatttttctgattttgttttatttccttttttggcatcttagctataagtctttgttattttagggcttgctgtagggtatatagtatacatctttaacttaccacagcctaccttcaagtgatattacgtcttctcacacacagtataatcaccttacagccgcagtgttggtttttctcctccagcctttatactgttgtcatacattttatttattctatatattaaatccccaatatattttcattagttttgtttaatctattaatcactttaaaaagttaataatttaaatttttttaagagacctgaatgtaagaaagatcctccctaaatgcagctgctgttccagccctcctggttctccgtgcagatctgggtgtatttgccccgccccgccctcgtcctccctcacctgcaggccttacctgacatttctgtagagcaggtcggctgatgatgaattctttaagctttcgtgtctgatctgaaggcatctttatttgcttctgttttgggagatgttttcaccgttaaggtggcggtttttatttctttcgttatttcagaaatttctccctcctcttttctccgttgcactgtttctcatgagaaccccgccttgtgcctctgtaggtaccacctctgcctttaagatggttttccgtgccgtggtcctgagcaggcttgtcctgttgtgctctggggctgccagcgtcttgtttcctgggcctgtgttccttgcgctgcctcgtgtctgttgagctttctacatctgtggctttatcctttccattgaaagtggaactttcttatagtatttgtcccgtcgcttcctctgccttctttcttttggggactctcgttcatgaattttatgcctcatgaagctgtcccacagctcagtgattctcttttcatttttcaggaatcttttcctctctgtgtttgtttgcttatttatttgtttttgagacagggcctcgctctgtcagtgctggagtgcactggggtgatcttggctcactgcagcctccaccacctgggttcaagcgattcttatgcctcagcctcctgaggagctgggactacaggggtgtaccacgacgcccggctaatttttttatttttagtagagaaggggttacgccatgttggccaggctggttttgaactcctggcctcaagcgatccagctgccttggcctcccaaagtgctgggattacaggcgtgagccaccgtgcctggcctctgtgttttgtttttgatagtttctattgctgtgccctcgaggacattaaacttttctcttacggattctaatctgtcattaatcccatccagcatgtttatctgacaggtagtttccacttctacctgtgtctcttccgagtctgaactgttgcatttttccagtagttttaacaactgtctaaatgtccctgtttgccagtgttgccgtctgtgcaacgctgcgtcttggtaggtattcgttgtttggttaatctcttcattataggccgtgtcttcctgctgctttaaatgtctggtaatctttgactggatggcaggcattgtgaattttagcttgttgtgttctagacgtttttgcatttgtatcaatcttcttgatcttttttcagagatgcagttaggtttcttggaaagagttgggtttcctcgggtcttgctgttgtggtgtgctgggacgccctggagcagttctcaggctggaatagctgtccctgctcctgtccctgtgcggtgtcgagtaatctttccatcactacaggccttgacagactttttttatttttaaaccgcatgaatatgttttccattcaaaatattagatctagaaatgaagacaaaactagacagctttttacagtgaactaaaactggccccattccggttgcggccatggaggtttgttttgtattctattcccactgtggagaagggaactcaccatgggtcgcctggaagcgtgcttttgtttctcatctgaattgtgcctctgtggtcccctgtcatcagcttcttccacaccccgcagtagaagtcctttcctgtcttttcctcatttctgaagatgtcccgaggttgctttcctgtccctcagtgtcccctgcactccgccatcacatcaccctctgggagtggctgacggacacggacacactgactcccaggcgtcctgcctcgggctggttccctctgtgcttccagccaaggtgtggtcgacagagactttctccgcacaggctcctccagctgagcaggggccgccacggactcccccatcctgtacttgtgtcgttttccaattttctcttgatgttatcgctggactctgagagcttcacagatatgtatttagaaataaagctgtatagctgggtctcctaacctttcacctccttatcacccagagggtgggacttccccagcatggctggcctcggacacctggtcaccgtcttgctgtccttgcaggttgaaggtcgaggagctggaaggcgagcggagtcggctggaggaggaaaagaggatgctggaggcacagctggagcggcgagctctgcaggtgagggcggggcagcctctgggtgaggcactgcctgggcctctcatttctttgggcgtcgtgaacgaccgtggttcctgctgccacagaacacccgttttctggctcgtctgtctgaactctcctccctcccatgtgcacccccttgcctggcagggaggccatgccgctgacaggcctgcactggctgcctctggagtcctctgcggcccgcaccacccacacgcctggtgtcggtggagtgggctctgggcagatttgcactatgcccacccgggatctgctgtggcgaggctggactgctgtttgtgttcttttaattgtactttctctttggttttcatcctcctgagttgctgcatggcaggaagccctcaggttcgaggttaccgggtttttggacaggccattgattttatcttggcacctgttagaggcagatcaaatctattttttatgaccagtttctgacgatgggaggagtgacatctgtggtgatgggcggctccgagccgcgctggcctgtcctcagcctaggacctgtcatcttgttttaactgggccgtggtgtacagggagcggtcacggggctgctgcccgcccaccagaggctctgcgtcagagctgctgaacgtctttctgggtgttgggctgagcagagcctgaaccctgctccttggtgcccacgttgcttgctgactgggggccaggcatccctgcaggcaccacttacggcttccctgctccagcttccagccctttccccaaggtgtcctcagtggccggcccttggagcttgttgaggcttgaatgaggtgaggggtgtgggtgagtgcggtgccagcactggtgaacacctgatggggcctggccaccatccctgttctgcgcagacggcgtgtgctcgggagctcactagcggagcactcctctgtgggagatgccaagggctgtcaggtaccgcggggttggcatgaggagtggggctggcagtgtcacctgtgaccctctcctgagctctgccagggccttggaggggtgggggctctgcccctaggcatgtcctgaagctgctcagagctgaggcgtggtgctgcagtgtggccagtgtggccatttggggagaggacagggctgggcctggtggtcctggggaagcagatgtttatgccgtgatatggtgacctcgagcctagcccaggattcaggagctgttcctccctgggtcagggcaacagggacaactgtgcccggatggcgtgggagaagcaagtgcagagcagtgaagcggggaggccactggggttcggcctgtggagtgttggaaacttccagacagccctccagctgccaccacctctgacaccccctgcgattacacccttagtggggggacgtccagggtggccctggggaaggtgaggcctcacaggccctgtggtggctcaggctgcccctggctctggatgcccagggctgtgccattgaaggaaatactgtaaataggggtccatttccaagataaagtgccttgaaccggcttaggtcaccaaactacagaagaaacaggatgtactaggcccctgcttggatcaccgatgcctgcttgtcggcctcccgctcccccctgccaccccacccccccacccaccttacttgccctcatccaaaccaaagaagtttagtctaagatgaaagttatactactctgcaaaatagttcgtttcatctgttcttatcagcctgcccagctacttaggtcataagtcaaataactgaagagcccctgagctgacgaggattgcagtgcattgtgggctgcaacaaaatgcaacaggacaaccctaaaaacacacctatagcccctgcccaacaaccagtaggcaacatccaggaagactgtgaccccagagtactcagcctgtgaggaaccgggggaggggcctgcgcactaggggataaatggcttgttgtcaccgtgctgggtgtgcctgcccaccagacacctaatcttgcaagaccattgaaaatctctcttttggctgggcatggtggctcacgcctgtaatcccagtactttgggaggctgaggcgggtggattgcctgaggtcaggagctcaaggccagcctggccaacatggtgaaaccctgcctctactaaaaatacaaaaattcgctgggcatggtggtgggcacctgtagtctcagctactcaggaggctgaggcaggagaatcgcttgaacccaggaggcagagattgcagtgagccgagatcacgccactgcactccagcctgggtgacagagcgaggccccaggagccggctgccgcccctgcacccactatgcgatgccctctcctctccctgctcccactccctctggagaagccttcaagttgggccgcttcaaggaagattgattaaaatcagctgcagtctgacttaattgggaacatatgcttggagaggggcttgactagttagaactttttgtaattagttcacagctggttggcgaggaaagagaatttcagttaccccttagagctgggcgcgagtgccgctgccctcccgcggtgctgaggccaggagaccaggcctgggaggtcttcgtgctgccttcctgggagggccgtcactgggccctgctgtggcactggcctttctgggtctccctaagagcccagagctgtccacacactcattagggccgactgggtgcacccttgtgtcgctgaaggggctggaagtgggtgggcggggctcctggactgcaagccctcccatcccgtggtgggggtgggagagctcggggcacccacggacggtggctggccgggcttctggcgccccctctcgagatggggaaagtgaggcccacagggagcctgcgtgtgaaggaggaaggagctcagactctccatgttgggaggcagaatgagtcttgaacgtgttgcagtgttctgaagtgaagacagaaatcgggcggaccccgtggaactccagatctggcggcagagggacccccatggctattggtgcagccgcaggagtcaggtcaggtgggcggcacagtccctgaccccacctgcagccacggcctcctgccccacccctgtccccacctcctgagtgtgccctgtgctcttccccaggcctagaactgaggagctggggccccagcgctttgttctcttctggctcccggctgccctctgatgcgccacctcatagctgggacactgggccttgtcagcttggaccccacagcctggggtgggccacagctctgtctcccactggctgcagcctggccttagtgtgctcccaaggatgtggagggcacgggcctttcccgcaggctgtctttggagatctccggtgatggctcctggagggccctgcacatacctggtgaaccaggcctgcatggtggccattcctgttgtctgtcataataccgtcgtccttacctccaagacacttggacgttttccacgtctgtggttctgatgggccacatgcggggatggagggcaccgagctggggcaggacccacagtgaggctggtcggggctcacaggctacggggcaggacacacagtgaggctagtcggggctcacaggccgccctgggtagagaggggcacgtccagtggaggccgcactgggcaggacactgaccttctggctgggcgggcgcatccccacctgacagtcccacccaggagcctccagcttgtgtgtgtgaagtgtgcagcctgggccggcacctgtgccccgtggggcccccgtgtcacccagcagtgatgggagcagcattcagactcaaccctgttgggttttttcagcatttgatgatgaacatttaaagatatgttgtgaagctgagggaagtttgcggcgagcgcctggtcacccgccaccaaggctccaccacggatgttccgccgcggggcttcctgacatctctttatccctcgcccagccgccgcgccactttattcttctgacgcgctttaagtaaattgcagacatctgcacgcttcctctaaatgcctcagtgtgcgtgtaattaagtagaattcatctttgggttctgaagcccgtgctccagccgttcctcgatgtggcctcatcatggtgcttgtttgggcaggttggtggtcagggctggtggagccccccagtgcggctccctccccgccccacctgcctgctcctccctggcgggggcctgggtggggtttgtggccggggccaacctcaatgtcccaagtgctgttcaggaaagagaccagacaagagccctgtgacgtttaaataagtgcatctgttttgggaaggagtgggtagaagattgccgggttccctgtgagcagaagctggaagcacacggagaccgttctgctcccgtctgcaccagcaggcaggtggtgtggtacctcacatccctggtccgtgtccctgggaccagggtggggcgggcccgtcacctctcctcagacctcctcaccccctccctgagatgccatccctgtggcccccagatccctggaattctgaagccaccaacgctgcagctgccctgggagagggccgcgtcccctcctggagccacagctgccccctttgtgctggcgtccatgcccaggtgtggtgggctggggtcgtgtccctgtaccggggcctcccggcgggtgctctgagccaacctcctcaggtctggcctctcccgctcgctggactcttagtaacgcatgtggctcatcagtgggaccttcattctgtgttcggctctttctcctgaaccttctaccatgttggacagagtgtggcctctggaccgggacgatgggcctggtgttacccggtggcctcgggaagtgctcctctctgtgccctgagggcctcctttgtgaggcaagggggttggacttttcctgggaggcaggatcacgggagggcagctctgcagggcccatgggactccatgctcaccagcccagccctcccctcccatgcgtgagccaccttcacgcacctcctctgtgccaggcgctgctctaagccagggcacagcgggggccaaggagccacagcccggatgttctgggcccctgttctgtgggagtcatacagcgagctgatggttcagacggatgaggtgcttcccgtccgtgaaaggaagcaggtcattggcacggggccccagggacccacgttaggtcctggcgggaccaagggctcctggtttcctcccgtggctcgtggaaggacaggagaagcgcccactccggaccgggccgccggggaggctgagtcggccgcagtcctcggagcagcatcgtgttttctatgatggtgctcgttttctttccatgagatctcactgctccacagattcccggcagccgatgctgtgtgtgggaaaccaggaatgttctgcccacgagggctgaaggtgccggtgaagttgggcgtctgttttaatcggagcttcctggcagcctagggagaaaggaaagtgtgatcacttaggtaattcctgccatgggagtttgcagactaagcctgagattctagaagaaatgtcaccgatgggggcttggccatggtgctgccactgatggaagagtggctttgtttcaccacactgaccagcaagtccaccgctgcgtacatgcccagaagaaccaaaagcagggactcatggatacgggcacccacgttcacagcagcctcgctcacggtagcccagaggtgagcgcaccccagcgtctgtggacagatgcatggatggacacagtgtggtccttccatatggtggagcatgatagatacagcctcaaggaggaggcgcgtcccgacacctgccgcagcatggatggacctgaggacgctgagctgggtgaaaccggccagtcccagaaggacacaggctatgtgattccacctacacgaggcccctagagtcatcagatccatagacaggaggtggagaggccggtgccaggggctggggctggggcaggggaatggagagtgagtgttgatggatgtgggctttagcctggagagatgaggaagctctgggaatgggctgtggtggtggccgcacagcactgagagtgtgctgaatgccagggagctgtgcacttagaatggttatggcggtcagcttcctgtcacgtgcgtttcaccacagtgagacccagcaggcagcttgttaggagtgagccacaccccggacgggaggggcagggcgcttggggtgactactccaaccctgccctcacacggcctctgtccttcggtcactcctgccttcctcaggcccttcatccaccagctggtcctgcacctgctgcctgagcccctgaggcctcctgccagctctggctgagcctcaggcaggatggtttaggcgctggctgttgtttgtgccctgtagtggggagactgggatagcagaggctgtccagggctcctgctcatccgccagtctggcagggacccagttcacttcctcggcaggccaggggagcagcctcccgggtgaagcccacgtgtctgggaaggaggaggaggacctgtggttgcagcgggaccaggacagtgctggtcccccgcctcctcctcccaggaagcatgggcttcgtgcccagggtgggtggccagtgggtgccctgtgcactgaccacactgccgtggtgggagctcaggtagatgcctcgtctgcagatggggcaggcgatgtgctgtgagctgaacgaggagcacgggtggcagagccaggacccaccgcggtgctcactgggctctgcccgctcatcccccacttgcccacgtgtgctgctccccccatgctgagctttgccaacggccccactagagcaccctccccctgtgggcctgcagctgctcacagaggcagcagagggtggcgaagggcctgggtgcaggggaggaggtgagagctgcagctgggggcagacattgaggggctcccgtgcggggtcgactggcgctcagagccaggcctcagcccaagtcactgttgtccaacccttctgacgattggggtttttatcttctccctccaaattgtttacaagtcgccctccgcagattaccttctgaaggactcgggtggaagtcagcgggtgattaccagcaccgggtaattggctgtgctgagagtccttcatctgctgatgaggcctgaggtcaggggagctttcatgagggcttgcgggcctcgaggtggcgcgggacgtgcaggagggcggcagagccactggacggacggacagacggatggtgtgagtgtgcccgagttctcacttccctatcacatggtgaccattctcgcccctgggtgacatgagactgaggtcagggtgctggggactggcccagagtcacacagttgtggctggtggaactgggacccagctcgggctctgccagacccctgcgtctgctgcctgggcaggcatgggcatgcacgcctggcccacgagcccttgtcctttgtcctagagatcgtctagtagtctctgctgtcccctcaagtagagatgtgcccagggacccactgctgagcacctcgatctcccccagcctgtccctgctgctgccacttggactgaagccatgtcttgcacttggggtagaaaaccaaactcaaaggtgggacctggggggtccgggctcctcaaagctgatatccctgagcatgtctgcagcctcttggaggcccggggcctcctctgggaagcaagggccgtggccctgtctgcaagtgccccgcacggggtgccagtccccgcggctcttggacatggcacgatggaggtctccccaagcagccgctgctgcaggcactgcgtccaagggaccgatgtcctttggttcctgggcgtatctgcagagaaacggatgagagcagctttttagaggagaagggaagcacagggccctgccggtgcctgtggggtttgaggggaggtggaaagtggctgcggctctcctgggggccaggaagaggcccctccccgccgcctccacttggcaggactctggggaaggggaagcactttgcttctctcatgaggaactgggtttggacctggagcctgcccatggcctggtttgccagatgcccctcggttctcaaggacgtcttgagtcctcagacagggatggagttcaagagggactcagagccgggcgcatgtggcagagggaggagatccacgtctttggtttcactgcgcgggtccccccgggcgatgcttgcgtgcccggcagagctccttagagcctgagaccatgtgcacgtccgttaacccgcccgacctttccatggacttggtaggtcaccatagccaccactctacagacagcagatcgaggctcagagagcaagctagtgcgtgtgcacacactctggaccgcagagtgtcagctctaggggccgtgccccgggcccctcctaggagagccaccctggagcctcaaggagcagggcccgggcagcgttgccccagctgggctgttcctttgctgacaggtccagggaagccccacatggcgtcctggggcagcagctgtctgtccttcctcctggatcctgtgtgtgtttcgggcccagcccctcctgtgttgtacgagtgtctggcctgggtctccctccagagctatgcatctcgtctctgttcagggactgctccaggcaggtggggcagatgtcagccttgctgggtgccatcaggaccatctcctcctcaccacaggcacagcccctggagcccaggagttcagcccagggtgatccggtctcagccttggccagattaggaaggggatgctgtccccgccccgctgaccagtggagactctcacatgccgtcttccctggccacggcaggccgcccgccctttctctgctatggaaccacagaggctgttatcaggggtgtcatgggaggagcccctgatccttgctggaaccaggacaggcatgacccctcccagctccctcctcccctggcctttcacgtggagctgcccagcagggtctcaggccgggaaggccagctccggagctgtgcggtggcctcagcgccgtctcctgggtgccagtgtcccggctccactggtttggcagacgtgctggctcacagggcgtgtcccgctggggaaagctgtggcccctccctcaggccctggtgaaccctcgcttagcctctgggcagggccctgagcggaggctatacagcacacggtcactggggggtggaggggggtcatggggggcgtttgctggggcccatggcgcaggtgggtgggctcacttgcaggctggctttgccgtggacgccttggctgtggggagtttccacttctggtgaagcctggccatggtgcgtgtgctggaggggcctccaggggctctgccctgtgaccccgggccactccctctccccctgcaggtgccccagatgaggcccgggacactcactccccatggtggagcactcagctctgcagaaagggagctctcggggttctgtcctacccccatccagttctcatcctcccaccgctcccgggcactggtcacggacagcagcatggcctctgtccctccttgggcctcagtttctctgtctgcttcaggctgccctctcccatccatgtgcctctacctgcttgggagctgctttcctggaataggtgggacacggccccgcaggcccctcggcgacaggtgtgtataggtgcatccagcccttcagctctcctgctggccctgagtaagttgcccaaggtcaggccgctgctgagggcagggctgggaggtgtgaccctcgcctgggcttgttacagaggcaggttccacaacccagccgtgtgcggcaggcaaggccacgggcaggagatgggaaggccaagcgggcaaggccacgggcaggagatgggaaggccaagcgggcaaggccacgggcaggagatgggaaggccaagcgggcaaggccacgggcaggagatgggaaggccgggcctctgcctgtgcctcttggtgggcctggttctgcaatgccctggcccaacaggcacagcccgagctgcctcgctctcctccgtgagccatttccttcagccgggagaggtattgattgaattttgacgccggacgatctataaatatgcataaggactggtggttatttaactgtgttttccattcccctcttgtcgctgcttccttccagcgctttctctgctctcggcatgcgcgtcaggcacacggggacaggcgcctccctccccaagtattgcctgggccttgctggaggcagcctcctccccagcagggaccttgaggatagggcccctcagaagccatttcctttgcccggggcagccaagggcccatggcacccagctcctgcacgcaccagggcgtgggctcagggctttcctgccctctgctccgggtcttatgagcattttggccggaagggaggtccttaaggtgaaactcaccacactcaccctcacagatgggaagccgaggcccagagaggacggagacctaccagcgagttaggggcggaactcacagtgggaacagagatggagccaacgccagcccccacccagcctcctcctccaggacttgggctgtagacagtcccctgaacacagagagaaacgggccgtcgaggccgaggcctcctggaggcacaggtgtgggcttacaaggcagcccgggagcacccgcaccctctctgggccttgtctctccctgtgcagacccctccaagaccgctttgtctgaaggtggggccctgtcatctccagaaccctaggcccagcctggaggggagcttggacagacagtaggcctgcaagtggccggggacctgccctgcccgtcccagcattctcccgctgcacccgccagccggctcttccgcttaaccgcgctgggtagcagcaccagagcgcctgctcgctctgcaagtgaaagatttctgttgagtcaatgattgcaccatcgcatcaaaggaaggctccaaacttttccttttgagattctcgtcagcgtctcaacagttttctcagctgtgaatcaaacaaggcaacaaattttagcagaagattatagccattttcccctttcttcctggaagctgtcagctaacagccgattccagcaaggttgctccatctcccatctgcttgagttgagtggtgccagcccccaacgatgctcctgcttgctggcacacacagtgctcagcgccctaggtgggtggggtgcacggggccggggcagcactggaggggcttctccccacgcctggagcctcacactgaccccctgggcctgcagctagaggtgggttctgtgagcaggaggcgtcctgccagaatgcacagagggcaggggtggccctgagcggatgggcagatggggcctgggaggaagtgatcttgcctcctgggctgcagagcccaccccacatccgctgcctcctggccccagtgtacaacccgctggcccttcctctgggctggggcttggtgtgtccattgcctcctggccccagtgcagaacccactggcccttcctctgggctggaggcttggtatgtccatggtgggaagtgcttgggtctttgcgtaggaggatcttgaggctgcactggcctgtgcctcatctgggatgcccctggaccacctcctgccctggtggtccctcccccactgcctccagacttctcaggccaccctctgagtcccttggggcccccagccacagccacgccatgcagagccctaaccctggtctgcggcccagcgccgccaccttacccgcacccctgaggggtcgcgtgagtgctgcatgaccgttctcctccagaaagcagcagaatacatgaaagagggctcacagagcactggctgggcccggccccccatggcgtctgcagatggccgctgccctcaccctccttcccttcatctccagggtgggcccagcagcagtggcacctctcccacaccctctgcttctcctgggttgcggctgtgacccaggaagtgagagtgggactctccacgacttggagaagggttccaagccctttcgtgggacctacttgctcttacttcccgcgttactttaaccactctagccacctggtttcagccccaggagcacatccgagtgtagtaagtgttcatcatcatcatgcattcattcagcaaacacatcttccacatggagcctgtgccgggatagtcctcggtgctggggctgtggtggtggacaggagtccctgtcaccgcggagctggacttctggcgtggaggacgcctactgagatgagtgtttaggctgatcggggtgtcccgctggcaacagcagtcacccttggcagccggcctctgctgggcccctgctgagcgggcgccgaggcaccgtgctgcttccctgctctgcagagagagacggaggcctggcccttcgcagcccccatctagcgggagggtctcggtgtccactgtctctcccagtggccgacggcccaggtgaggggctgcccgtacccgtctccctctgcttccggctcccttggtggccactgcactgtgcacttgcaggggctgccaagccacagaagccaggccagccggtcccctgcctgtcagctgctgactcacaggggtctttgtccccatcagctgcagaggtggcctgcaggctccaagaagccaccaaggcagggccctgtgggcacaccctgacgtcacctggtcctgcagactgtggtcactgcacttggtgtctgggcccagctggcaggagtgggagagggccgacggggtggggggtgatggtcaggccactgtgccctagaggctcttccggctgtggaggaggagggtcttgggggcagggatccccttcagcctcacatttcccagcccaagcaggatacaagtaaggacatttccttacggagccccagagtttctccttcaccctggagctccctccaggcagcccctctcagcccttgtcctccccgtggagagctgctcttgaagttgaaatcgtggcacatgcaaaggaagaggctggtttcagccccgcaggctctggcagctgcatccacgcttcctgctgtttctcactccccacccggcccgccatttctaacagctctattgaaatgcgacgcacattccacgtacctcgtccctttgaagggggcagttcagcgacttttatgtccacggctagtgcaaccactgtcacccttcgcagaacgttttgatcccctctcaaggaagcccgaaccctctagttatccatcaccctgctgtctcccgtgccctcaaaccctcagccaccagtcggctactgcctgcctctgtgggtctgtctgttgtgagcatttcctggaaagggagtcccgtggcctgttctgagcatttcctgggagggagtcccgtggcccattaccagcatttcctgggaagggagtcctgtggcctttgtgattggcttttctcacttcccttgttcaaggttcacccatgtggtcataggtgtcagtggtgtattccttcttgtggctgaaacaccccactgtgcacggccgcatcttatatatccagtcatcaactggtggaccttgtgttccttcttgtggctgaaacaccccactgtctgcacggccacatcttacatatccagtcatcgcctgatggacatctggatggtttccgctttggggctgttatgaacacagctgccctgaacattcacggacgagtctgtgtagatgtgtgtgcagttctctcgggggtctgcctgggactgggcctgctggatcacatggtaaccgtttcaccattggaggaactgccagactgttctccagggctgccgcacactagggttccagtttatccccatcctcaccaacgtgttgttgcgtgacttcccagccgtcctgggggtgcaaagtgatacctggctgtgatttcactttctgtctctggatgccggatgatgccgagcagcttttcatgtgtctattgaactcatagaagtctgtcttcagatgccttgcccattgtgacactgggtcctcataggagtctgtctgcagacgccttgcctattgtgacactgggtcgtttgctgacagtgcttcatgtgttgaggtgtaagttcttcgggtatagatttgcagacattttctcccattctgtggcttgtttttgcctgtcactggcgtcctttgaagcacaagagttcttagtttggatgaagtctgattacctgttattttcttttgttctttgtgctttgggctaagaattctttgttaaatccaaggttaggagggtttcctcctctgttttcttccacaggttttacggttgggctttgcgtgggtcttggatccattgttacttagtttttgtttatggtgggaggtggggcccagcttcattctttggcatgcgccagcccattgtcccagcagcatttgttgaaaagactatttttccctatcgaaaggtcttaacacctttctcagaatcacttaacatgaacgtgtggttggttcctggactctccactgtgttgttggtctgtacgtcggtcctcatgcccacaccacaccatcctgattgcagtggctttgtagtaagttttgaaatcaggagactgagtcttcctcccgtgttccccctttgcaagcctgtggtggctcttctgagcccctgcagttccgtgtgagtttcagaatcagcttatcagttcttcagggaggccggctgagtcctgggattgtacagaatgtgcagatcagccctgggagtctctggtcccgacagcgccgggtcttctgatccgagacatgggatgtttcctaatcacctagatcccgcctagtttcctcccatgctgttttgctgcctgtgtgtttgaaatggctcctcttggtggggtgggtgcaggagtggtgctgtttgtataggacacagggccgtcctcccatcccgacactcggctgccctggagacgggcctcagcacagggctcccattacccctgcacttccagcacctgctgaaatgtgtggcgcgcgggctccgaggcatggaatggtgtgcctgactctgcgctgcccaggctgtggtcacagcagcaggctggaagtttggctgtcgcccccagccaccttggggcacggtcctgtctcacctggagcagaggtcctgggcccccaggggctcaggcgtggcctccttctggaggggccgggaatgtcccctccacgtgctgagtgttggcccaggaggctcctctgtgggatgccagctgctcccaccatgagtggcagctccacccctgtattcacagctgtgctgagggcatccagggcctggaaatcatgtcagatggacagacaggtgtgcgggtggatggactaagggaagaaaggaaggatggcaggaacgaacgcgtggaggtcaagagcctggcccaaaatcacggtggggacgtgagcgggtgggtggtgcccagtctgcccctcccgtgctgcctctaggggctctgccttctccaggcgttaggcagggaaagtcccctgaacttacagaaagacgactagctgcctggaatgttgccatctgcagagccctagcgcctgtcctcccacttccctcgccctcctgggaggtgggttctccacgccaccagttatggagcccaggcttgttctcagccctggtcagcggtgccatcgcaggtcgctccagccccagccgcgggtgcccagtgaatgctctccgtgacccagggcctcctgctgcaggtggaagccgggccacgggaacctgcgccgaccttggcctcacactgtggctccgggagagcaggacctggtggtgcatgcgtagcggctgaggaggacaagcctgggggctggtcccagcccggacacggtggctttgcacacaccaagccttcgcccccagcggggccagcagtgcagggcgctgcactgttgggggccagagggtgacaggattggtgtttaagaagaacttctcagttttatcttttctctgttttgatttggtttccttcatctctactggcttgggcttttggtccttaaatcctctaatatacagaattgtttcctggacctcaagccccccatcaggggggaaacctcatcccaggatgatgggccggtcgtggggcaccctggctgggggctgggggctggggctgtgcctctggctctcgttcctgcccgtggaacgttgaacgttgccaggacatccaccccggggaacttgacgtcctcaggcactgctgggtccaacgccagcgctgggcgcaccaccgctgacccccgacccctcctgcaagtccccctatctgctaagtaggaggatgctggggccaggcgaggccttgctgggcagcctctaggatggtcactacctcctcccacctggaggtcccttcaggaggtccgcggtgttgaagcctggggaggaagaggaggctgaggcctgggagaggaagaggagggtgaggcctgcggggggaggaagaggagggtgaggcctgggggaggagggtctcactgctctgggtcagaggagggctgagtacacgctgtgcggcctggttcttgccaggggtcagctgactacagccccgccttctgtgcagcccctcaactaagaaccgttgtacatttttgaagggttgaagaaaatcaaaagaagaatattttgggacacacgcgggttatctgaaattcagattcgtgtttccgtgcccgcagctccgtcagcggggcccatgctggccttgtgtgccctgcggctttctgggtgcagttgcagcgctacgtggttaggacgggggcagggtgactgcacagccccgtgactggctgctctccgcaggaggcggccccaccctctgcccacatcctccctggctcctcgaggctccgtaggatggtgaagaggttgagatgctgtccagcccacagaggccccggaaagccagtgccgcccgtcagaggggtctcctgagtgcgtgtgggtggctggattctgcatactgggttatcttaaccccggctgtgaaaactggatgaagtagcaatcctttcaaccccaagagtctgtgattcagccagagttacaagatgtctcttcatcctctgaggtttacaaggttctcagaaaacctgtgaagagctgcgcggatcctctcctgccccggcccagcggcagggctgccgcctccctctcccctgggcctgagtgggtggatttcccctcccctcctccttcccaggagaagcacagagggagcggccaagcgagccgtgtctgcaaaccccgcttccctctgcggcggcctctgccatcgtgccatggggccggaggtccctggtccaggtcagcatgtccatctccactggcctcttccatgaggggggtggcagggccagcagttagcttgtgtgacgtgacgtcagggggatgtcttagagtccggggtggcaccaggaggggtgaggtctcttcccttcttccccatcctctcctctctccctgttggaggcacattctgggctctgggaccacgattgcccatggctgatgagctccagcccaagtgaggtccccagggtacagcccaagccaggcctcgccgtccttcggggacttggagagcagtggcccacagcagcctgagctcttgggaggctggaggcttactgcgcccggtctcttcaccccgtggggtgtgtccacaccggcctctcctgagagcgtggggtgatctgaacacaggatgtgtttccctgttcccctctgggagataggagagtgcgtgggcagaagccccaagggtggcaggaactcattgccaaaggggaggaggccattgctatgcgtggtgctggcctggcttgctgggtcatgtctgtgcctgacatgacccatgtcatgaccatggtcatgtctgtgcctgagggaccgggtgcccatccagtctcactgccccacagctcacagccacaagctgcagaatctcagcacttggcgggagccctggcccgtgtgtgtgcgtgtgtgtgcgccgctggctccagccctggcctgtgtgtgtgtgtatgtgtgtgtgtatgtgtgtgcgtgcaccgctggccccggccctggcccatgtgtgcgcgcgcctctggtcccggccctggcccgtgtgtgtgtgcctctggccctggcccgtgtgtgtgtgtgtgtgtgagcgcctctggtcctggccctggcccgtatgtgtgtgtgcgcctctggtcccggccctggcccgtgtgtgtgtgcgcgcctctggccctggcccgtgtgtgtgtgcgcgcctctggtcccggctctggcccgtgtgtgtgtgtgtgtgcctctggccccagccctggcccatgtgtgtgtgtgtgtgtgtgtgtgcgtgtgtgtgcgcctctggtcccggccctggcccgtgtgtgtgcgcctctggtcccggtcctggcctgtatgtgtgtgtgtgtgtgtgtgtgtgtgtgcgcctctggccccggccctggactgtgtccgtgtgtgtgtgtgtgtgtgtgtgtgtgtgcctctggccccggccctggcccgtgtgtgtgtgtgcgcctctggtcccagtcctggtctctgtgtgcgtgcgtgtgtgtgtgtgtgtgtgtgtgcgcgcgcgcctctggccccagccctggcccatgtgtgtgcaccttttcatatgtttatcagctttttgggtgtctttttgggaagtgtctgctcacatgttttgcagatttttagagtgggttgtctgacatgcccttggttatttctgacatgcccttggttatttctgacatgcccttggttatttctgacttcttcgtatgttctggatctgaaccctttctcagaaatgtgattttcaaacagcacctcctgctctgtgggtgcctttccactgtttcagtggatgaagttcttaatttctataaggtcagttgtactcttttttttttcttttacggccagcacttcctgaaccctgtttgagtaacctgtgtctactcccaggagacagaatgtggtggaattgatgtttgtgtgtgatgtgaggtcggggtctcaggtgtgcagtgaccctgcacctccctgccgtgggcggctgttgtttgtgtgtggcgtgaggtcggggtctcgggtgcgcagtgaccctgcacctccctgctgtgggcggctgatgtttgtgtgtggcgtgaggtcggggtctcgggtgcgcagtgaccctgcacctccctgctgtgggcggctgatgtttgtgtgtggcgtgaggtcggggtctcgggtgcgcagtgaccctgcacctccctgctgggggcggctgtcccctgctgtgggcggctgttccctgctgtgggcggctgtcccctgctgtggggggctgtccctgctgcagggctgcatggtgcttgttgctgggggtcggtcacccaccacaggtcagcaggctgggcctccaggcgcactcctccctcaaggatgccacacacatcccggccctgggtttcgtgggaacatcaggttgcgaggcgcattcctgagccacccacgctgatgccaggctcccttgccttccatctctgtgtggttgaccttgtttctcttgtggcacggggcaccttccaggctggtagggaagagatgggaacatggccacacgggctcccagtctcatcccagccaggaacctcagaggagaggaagcctccctcccgggcactgagtgtggaattctgggaagcaccgcacttggctgagcaaaggccgcatgtcccctctcaccctgttcctgtggttaggcagaagggacccagcaggtggccaggccttgttcctgcacctgtccacagggcacagggaaggagccactccttccaggagagatggctgccaggcaggctcaagaagacaaaagaactgagcactgtgctgtgtgtgacccgtgctgtgtgtcttcctgggccatggtgacccatgctgtgtgtgacccgtgctgcgtgtgtgcctgggccatggtgacctgtgctgtgtgtgttcctgcagggtgactatgaccagagcaggaccaaagtgctgcacatgagcctgaaccccaccagtgtggccaggcagcgcctgcgcgaggaccacagccagctgcaggcggagtgcgagcgactgcgcgggctcctgcgcgccatggagagaggaggcaccgtcccagccgaccttgaggctgccgccgcgagtctgccatcgtccaaggaggtggcaggtaggcaccccccacccccggtccctgccatcctcgaccttccgtgggtaggtccatccatgcgcctttggggcagcctcaggcgcccctgcctgtcatccccagagggtttgtcctcccctgtgggcagccgggtctggtggttgctggggcagagcaccctggccccgtgtccccatggccccgtggggttgtgcaaacaggtggagccatccgagtctgcaggcagctgtggagaagcaaggggctgaaatttcaggcccttaaactaattcgtatcatttgtcagtttatatgtaccccattaatcacaagtaaatccagtcctccacgaaaacaagtccatctctcaccagcttaagtgtgcttcatggcgtccagagagccctttgaggccaaggcctgtggcgtcccagggaagaatgaggcctccatgagggccagcagggcctgcccacaccctccaggtctacatgaggcccacggcctttggaacgccagcctatcccctgatgtggggaggtggtgctggggtctgcccacgccaagcctcggagggtgctgccggggctgtgtcgactctgcagggtgcccctgaaggagcagggctgggagtccagagtcactgtgcagtctgcacccccagcgaggctgtggggctcaggagacccctgccccctgtgttgctctctgctgttggagggagctgggcactgccccacgctcctggttctggggggacctgggggagggttccctgtccagcccttagcagcagcctggagcgtggcccggcgtccccttgctcctgtgttagagccacccggctgccagccccctcccttgggggtgtctgcaggctcatctgtggtggggcctggaggctgctgctttctggcctttggcatctcgaggtgatttcagactcagctttcatccgatgataccttcttctgtttcttcccacctacttgccatcgcgccctgtactgtgggagagcattccctgtgagcatgcaggtgcagaggttgtgtggcggtgacttgtccgcttcccacagcccagcacccaggctgatgtatcaggagtgattgtcctctgccccgctcctttgtggggagggtcttaggtggggtcttccctccctcttgtgccccacccccataagccaagactgccctgagtctgggcgcaccctgccggcaggtaggggcttagtggctggctagcgggtggtctgccctcctggagtagtatggtggggttggaggacaaaagccagaagggggggcctgtgttgccagattgaggggcgagctgatggcagtcgggggctcctttccagctccccacctgcacaagggctgctcccggtctccactgtggctgtgagggcctgagcccccatgtccccagccccctttctggtccagccgtggctccctctccgccctgcattctgcaggtgttattggcaagtttcggagctgaggatgcagacttggagccatatttttaggtggctctgcaccctgggagaggatttgggaaggggccttccatcccctgctgtcacgggcctgtgccttggctgtgcacccattcgcttgtctgtttgttcccctgttgtctgggtctctgcccgtctcgggtttgcccgtctgttcgttcccttgttgtctgggtctctgcccgtctcgggtttgcccatctgttcgttcccttgttgtctgggtctctgcccgtctcgggttcacccgtctgtttgtccccctgttgtctgggtctctgcccgtctcgggttcgcccgtctgttcgttcacctgttgtctgggtctctgcctgtctcgggtttgcccatctgtttgttcccctgttgtctgggtgtctgcctgtctcgggttcgctcgtgtgttcgttcacctgttgtctgggtctctgcgcatctcgggttcgcccgtctgttccttccctttttgtctgggtctctgcctgtctcgggttcgcccatctgttcgttcccctgttgtctgggtgtctgcctgtctcgggttcgcccgtctgttcgttcccctgttgtctgggtctctgcctgtctcgggttcgctcgtgtgtttgttcccctgttgtctgggtctctgcgcatctcgggttcacctgtctgttcctttccttgttgtctgggtctctgcctgtctagggttcgctcgtgtgtttgttcacctgttatctgggtctctgcgcatcttgggttctcccgtctgttccttcccttgttgtctgggtctctgcctgtctcgggttcgcccgtctgttcgttaacctcttgtctgggtctctgcgcgtctcaggcacgcgggtggtcggcatctggctgtgacaggtgcccgggccatggctgattgggagtggggggtgcgaagaggcgtgtctgagctgaccatggagaagtcagggccagcgtggtctggaagcaggaaggggaggatgagcagaggcctgggatagtgggggccgcgccacatggcgccaccaggaggtgagggtgggtcgggcgtccaggccccagtggctgatgcagcgcgtgtctgtgcccccaaaaatcacagtgttggtggcctctgttttatgtaaggcctaaccccacagagggagaggatacagaggcagacttttggagtctggaattggcgggtgagcagtgaaaggactgagtagacttgggaaaccggaatctaagccggcggcgggtggagctgagaacccgcctgagttacacctcaaaactccaacgcagcccaggaactggctgcaagtggcgttaggggagggatgccactgactgaagcacagtggatctggaggcttgattgctgaattaagagatgggtccccggaaccatctgtccatctgtgtgccctgggcagttgccgctccccaggaaagatgaagactccaaaacaagccagcagtttattcttggagcagtgatacttaaagtgcagtacccaggtcggccgctgcctccctgggagcctcttagaaatgtggattctcaggtctcatctcagacttgctcagccagaggcctgggggcggccggcagtctgtgctaggcagccctacagaccacgcggatgctcagcgcgtttgtggaccgctgctctggagagggctggcaaggtccctggacagacccaagtcaggacaacaggcttgaactgagcccggattgatagatgcaggtgtgggcctggatcgcacacccccgccacgtgccctgcagaacacgggcagcaggtgtgaccctgtaggctatggtggaaagacctccctgtgtatccgagcagcccagaaggacctggcgttggcagttccccagctcgacagctcccatggatcgctccctggggaaaaccgtggcagacggctccatgctcctacccggagtatccctgggcccctagtgccctcccctagtgaggagctgatacccagggattgtcagacagcccaagggaaaggacaggaaacgagcagggaaaacagagcacagcgaaacgcagagaaacacagcgtcagcggggagggaacccactgtcccagcaaagaaaatctccaaaaactgtctcctggatctcctcagagagaagacggggcttcagcaaccaaacaacagggcagcttaacacacaccaagagaaagcagtgagcagggggaaggcaaaagtagggaacagtgaatggaaatctaagaagatttgtaaagtaacgttgagaaagtctgaaagtaaagacaacgagatggaaaacaggagaagagaagtaagaacattagaggtacagcccactgtctgaacaacaggaacatggaaggagggaacagggaaaaagcagatgataacagaagtgcctcaaggacgtctccctgaaggaaggacgcagctccctgcctcccgggagaggctcagactgggctgtctgtggttggggatagacccgcacagtgtgcggcagcatgaagattcaggacacaggacgaaaggaagaccctgagaacttcagagaagaaacacagaggtcacttgtcaaaggatccgggatcagtcatctagcgtttcctagcagcagcacctccgagtttctagcagagtgacctgcatctcgggatctcatagccccccagccccacatcaggtctgaaggaagaagtacgggcatctgcagggttcaaggccttaaaaacttgacggccccgcaccgtctctcaggaagctggcagaggatgcactcccaaaggatgagggagtaaaccaggaaagagtgtggctgtggcacgcagagcagaccacaggggcttctgccgcggaagcagagaaggaggcctcaggcctggggagcagccggcaggggccagaacaggccagaggttctgggatatagagcagagaaggaagccttaggcctggggagcagctggcaggggccagaacgggccagagtttctgggatatagagcagagaaggaagcccccagcctgggcagcctccagcgggggctggaacccaccagagattctaggacagaacctggtgcgttgggtgtcatgatgcggaccggagctttccacacgtgtgtgccaggcgtgggctgccatggacgttggtccccaggtccctgggtcactctttggcagcctcctccttccctgcgtgccacacacatttctcaggttttaggtttgctgccccgcacaaaaagactgggaagcacctgtgtagacagctggcaaagagggatggctgccaagagccatgagcacctagaaggctgagtgcgtgggaagcaggacgaccattggctctggggacagcagagttgcatgagaagcagcagaagcagcagtgtcctgcattctgagctggccctgagcagcctcacacagtcgtaagggagctgaggcctgatctgaacacagccctgagcctcatattaagaaaggggaccaggaggagggagacgcgtgttgcagggtgggagggagggagagctgaagcctcgctgtctctcgggaagtcagcaggacgtccgagcgctcaagtccagaaggagccacagaatgtgtattccagagaaatgcagttaataccgacatgatcggctgagaggtgaacatggtggactctggagagaaaggaaggaaatgagaagtgtggagaccgctgttccctgacacaccccacagaattcctgggctcttaactcatgtgcatgtaaatctaaagttaaaaagagaaaagtccaggtcacgccgcttgctgccagagagggctgtcccctccccattctccagatgaggagcaagggtgtgcccgcagtgtcagcagacccttgacgtggaccccacgacgcgccctcgctcctgtgaccgtgcgtggggtgaggagttgggggtgttcccgtggtgtcagcagacccttgacgtggaccccacgacgcgccctcgctcctgtgaccgtgcgtggggtgaggagttgggggtgttcccacagcatcagcagacccttgacatggaccccatgatgcgccctcgctcctgtgaccgtgggtggggtgaggagttgggggtgttcccgtggtgtcagcagacccttgacgtggaccccacgacgcgccctcgctcctgtgaccgtgggtaggctgcctgcacagtccctgcaaagggtgagatggcaggtgtgagcctgagacagagacggatgctcctccccggcctggctggccctgagcatgggttaggggtgggtctcctgggtcacgagagagaccagggtaagttgtgagggcttcaggccagcaggtctgcagatggcaggcctgtcactggcttaagggggagccgcgtggcctgagacagcgcccagtgtcccaccaggaagcaagtcccaggggagtcccctcacaccctgatcacccagcatctcgggggtcagcagatgtctcttcctgctctggggaatcagggcccccaaggaacaaggtgaaggggatgtgacggtgggacgaagcaaggggacacgtggcggtggggtgggcgaggggacgcagcggtgaggtggggtgagcggacacggtggtgggatggggtgaggggacgtggcggtgggtatggggtaagcggacgtggcagggggatggggcgaggggacatggcagtgtggacgtggtggtgggatgtggcagtggggacgggatgaggggacgtggcagtgggggacggggcgaggggacgtggcagtggggacggggcgaggggacgtggcagtggggacggggcgaggggacgtggcagtgtggacggggcgaggggacgtggcagtggggacggggtgaggggacgtggcagtggggacggggtgaggggacgtggcagtgggggatggggcgaggggacatggcagtgtggacgtggtggtgggacgtggcagtaggggacggggcgaggggacgtggcagtggggacggggcgaggggacgtggcagtggggacggggcgaggggacgtggcagtggggacggggcgaggggacgtggcagtggggacggggcgaggggacgtggcagtggggacggggcgaggggacgtggcagtggggacggggcgaggggacgtggcagtggggacggggcgaggggacgtggcagtggggacggggcgaggggacgtggcagtggggacggggcgaggggacgtggcagtggggacggggcgaggggacgtggcagtggggacggggcgaggggacgtggcagtggggacggggcgaggggacgtggcagtggggacggggcgaggggacgtggcagtggggacggggcgaggggacgtggcagtggggacggggtgaggggacgtggcagtggggacggggcgaggggacgtggcagtgggggatggggcgaggggacgtggcagtggggacggggcgaggggacgtggcagtgggggatggggcgaggggacatnnnnnnnnnnnnnnnnnnnngacggatgctcctccccggcctggctggccctgagcatgggttaggggtgggtctcctgggtcacgagagagaccagggtaagttgtgagggcttcaggccagcaggtctgcagatggcaggcctgtcactggcttaagggggagccgcgtggcctgagacagcgcccagtgtcccaccaggaagcaagtcccaggggagtcccctcacaccctgatcacccagcatctcgggggtcagcagatgtctcttcctgctctggggaatcagggcccccaaggaacaaggtgaaggggatgtgacggtgggacgaagcaaggggacacgtggcagtggggtgggcgaggggacgcagcggtgaggtggggtgagcggacacggtggtgggatggggtgaggggacgtggcagtggggacggggcgaggggacgtggcagtggggatggggcgaggggacgtggcagtgggggatggggcgaggggacgtggcagtggggacggggcgaggggacgtggcagtggggacggggcgaggggacatggcagtgtgggacgtggtggggggacgtggcagtaggggacggggcgaggggacctggcactggggacggggcgaggggacatggcattgggggatggggcgaggtgacgtggcatcggggactgtgcgaggggacgtggcagtggggacggggcgaggggacgtggcagtggggacggggcgaggggacgtggcagtgtggacgtggtggtgggatgtggcagtaggggacgggatgaggggttgtggcagtggggacgggatgaggggacgtggcagtgggggcagggcgaggggacgtggcagtggggacggggcgaggggacgtggcagtgtggacgtggtggtgggatgtggcagtaggggacgggatgaggggttgtggcagtggggacgggatgaggggacgtggcagtggggacggggcgaggggacgtggcagtgggggacggggcgaggggacgtggcagtgtggacgtggtggtgggatgtggcagtaggggacgggatgaggggttgtggcagtggggacgggatgaggggacgtggcagtggggacggggcaggggacgtggcagtggggacggggcgaggggacgtggcagtggggacggggcgaggggacgtggcagtggggacggggcgaggggacgtggcagtgggggatgggcgaggggacgtggcagcggggctgcagagtcaagagctccctttcgtgtttgccacggcttccccaagggctgtctctggtgtgggccccagacctccggtcagagaagacacagaaacacataaagaggcccctgctctcggggatctgagtccctgctcggaagttcaggcaggaacacccttgtgattttcctggtgtctttgacaaggcagtcactaaacaacccttgccatcggcacgggcccttggcggataggagccccaaagcccggcctcccgtgctggctctgactcctcactcagcccccctgccacgtccaggctgggccagggagattgttaattgcagcttaattagggaatgcattaatattaaaataatcttagcagcacattgaaggtgatcaaatttgtcactgcctgtgtgggcacagctgatcctagaggtgtctttggggaggagggaggcagggggaggatggaggagcgaggaagagggagaagagataccagggaggagaagggaggaggtggaagaaaagaggggaggcccgggaggggaggagggaggggaagatggttggccacagagttgctctgcctggaatccacctgctcggcctcagggaggagggtgccctcgaggggaggcctggtttggtgtccctgcctgggctgaggacgggagcagtgactgcctttctgttgcgtcctgtgcactgcttctgtctgtatcggcgcgtgtcctctgcagtctcaggactcacacttttcctgcttggctggcgctggccccacaggtggcctcagtgaggtgccctaatggctgctccgtggaccaccaggacaagcactgtggagagctacccattggcctggcagtgccaagccagctgtgccctcccacggccagaaatcagtgcccagctctcacgtggcacaggcctgtgtttacgtcatgcccccaccccgtgccacctgggcagggccgccacctgcccacgcctctgtttgctcagtacaaacaccgtgcaatgccgacagctgagcggttcaaatgggatgggggtgcaggggctccagccctgttcggcagttagtgggaggtggagaagaagggctggcgtctgaagtgcaggaccatgcctgtttggcccagtcctgtgccaagctgagatcgtctgcctgggtcctgccatctagggacctgcaggtcatggggaacagtctcaggtgtggcaggagttccgtcgtgggctcctctagggaccggtgggtcgtggggagcagtgtcaagtgtggcaattctgtcgtgggctcctctagggactggtgggtggtggggagcagtgtctggcgtggcaggagttccgtcgtgggctcctctagggaccggcgggtcgtcgggagcagtgtcaggtgtggcagttctgtcgtgggctcctctagggactggcgggtggtggggagcagtgtctggcgtggcaggagttccgtcgtgggctcctttagggaccggcgggtggtggggaacagtctcaggcgtggcgggagttccgtcatgggctcctctagggaccggcgggtcgtggggagcagcagcaggtgtggcaggtgttccgtcgtgggctccgactgtagtgctggagacagaagtgatgtgacgtcagccaaggcctcgggcacgagctggtggctctccactgtctggagaagtagctgccccccacgtgctgcttggtgctgcctattttttaattgaattgttagtattgagtttggggtgaatccaagttgagtatatagctgataaatatcttctcccagcccgtgacgagcctcttcattttctgaccctgtgttcctcggagcaaatgcttttcatctgggtgcatgctgatgatcaggttttcttttataggggtcagatccagaaactctctgcataactccaggccaaacatattttttcttgttttctactaaaaggttttaagttcacatttaaatctgtgacccattttgagttagtttttgcccatggtgtgagcttgagttcaagctacttttcttttttgtttttatatggatgtccaattgtgccattattattgaactgactgtcctgccaccattgaattatgtttgcacctttgtccaaaaccagttggccatgcgttatgggggtctctttctacaccttctcttctgttcccttgatctaagcgtctgttcctttgctgttaataacaccccacggtattgattactgtagcttcgtagtaagtctcgaaatcagcagcacaatcccccactttatggacaagatttacattcagcttgtctttacctgcaaaacgcctgctcagatttttagaggaattactgcatctgtcagtcagtctggggagcatctacatcttggttgcagtgagtcttccgatacatgaacacaatgtagctctccatttatttacgttcttcttattttctttcatccacattttgtggttttcaccgtacccacccaccccttttttgttagaaatacacatggttttgttggttttattgttagtgttggagctatgtaattatttgtaggcttgtttttatgggtcccaggtgttcagtgcgtgtgtgtagatgtatgacggatgtttatgctggctttgtaacccatgaccttgctgaactcacttcttacatctgggttagttgctgttttgattttgttttctaatcctttgcagtcatagcacctgtgaatagggacagttttgcttattttgttaagatccatatgtcttctattttgttttcttgctgtgttgccctgtctaggaccttagtatggtggtgagtaggagatggggcaacagagatcctggcctttctcctcaccttgcagggagagcagtccatcctcctccatgaggcgtgctgctagctgcagtttatttgtggtttttccttatcaagctgaaaacgctctttccattcttagtttgctgagagtgtttatcatgtaggatgttggcgtctgtcagatgcttttcctgcatcaattgatgggatcgtatgttttttttcccttacaccgttagtgtgattgacagtgtgtcattgtgatttttttgggaagtttccaacgttgagccaactctgcattcctggaataaaccccccttggttatggcatagtatttttacatgttgctgagttcatcttgctgacatcgtcagtaatcttcacgtctgtgttcatattggtctgtagctttcttgtactgcccttgtctggttgtagtatacacgtaatgaatgaagtgaattggaagtattcccccttttatgtcctagaggagattatatagaattggtgttacttctttaaatgttttgtagaatttgctggtgaaaccatctgggcctagggattgtggttgtggcaggttctaatcattacaggaatagtgagttctttcatctcagctgaatgttggtagaatgtaggttttggggttttttttattgtgaggaactggttcattatatctgtgatcaaatgtatgagcagtgaattgtctgtgctcttgcctcgctgattttatcgtgcctgctgggttcgtagcggtactccttccttcctgatactggtcgtttatgtctttttttttcttttttctttttttgtctgttagcctttctggagatgtataaatttcactgatctccttagagacctagtttttggtttcattgatattttgctgttgtagttttgtgtttccttccttctgcctgctttagttttagtttgctctcctttttttctggcctcttcaggtggaagattagattgcatatttgagatcttttctgctttccaacgtaagcgttccgtgttagaaatttgcatctgagtgctgcattagcagcatttcacacattttgataatgttgtatttttatgtgtgttcagttcaaaacattttcaaatttccattaagatgtaccatagtttgaacgtggcctccaaagtccacgtgttggaaacttcatcccagagtgatggtgttgggaggtggggcctcctgggaggcgttgaggtcacgtgggctccaccttggtgagtggattcgtgctgttgtaaaaggggcttctgttagttggctctctgtatctgccctcctgccgtccaccatgtgatggcgcctcaggaaagcccttgccagaagctggtgccttgatctcggacttgccagcctccagaactgtgagcctataaacttcgggtcgttataaattaatctcaggtattctgtgatagcgccgccaatagactaggatgcctgctgtgatccatacagatttagaaggatgctttttaatttcaaagtgtctctccctgattttctgggtaatttctgttcaatttcattatgttgagggaacgcactttctacgattcactttctttgcaatttaaagtttatttggtagctgataatttgataacctcaaaatgtcccatgtgcacctgataggtatgtgtgttctgccgattaatagatgtgttttggccatttatagttaatgtaattttttatgcatttggatttaggtacattttatgattagttttctgtttgtcctccattttttattcccgttttctctttcctacctatttcaggttatttggccttttttatactccattttgatgtatctatgtctttattatatctatttgtatacttttaaagtgatttttctgtggtttacaatgtgcaagcttaacatttcacggtgcacttataattcatattttatcatttcaggtggaaacgtcaggatttcaccacgacgtaggcttctccctgcctccctttatgttgtagtagtcctatgtacttactctctatatgtggaaaaccccaccaagaaatattacaattcttgctcttaactgtcatgcctattttaaaaaacataagaggcaaaaagtagtttgtggttttgcctcttccttctttcctggcgttcctgggttcccctgggatcatttctggtttggcaggacttccttcggggcttctttagagtaggttctctcagcgtttgcttgcccagcagtgtcctcaccccacctcgttactgaaggataccattgctggatgtggggttctgggagagtggttcttgtctcctagcactttaaaaatcgacactgtttccccatcttctggcttctgtggtttctgatgagcaacctgcagtcactcaaagaaatctcccctttcccctccgtgcagatgagagaggctttcagacactccaagtgtggtggtgttttaagttaaaggacgggaaggaattcatgtgcccacattgtctgctgggttccagcgtgtgtgggtgtaatgcctgccaccctgccgcgagaaggactcctgtggtgatgtgctttctacaccaagcttagtggcacggcatcatctctaagatactgtgaaaagttaagtctgtgttttccaatcacttgcttcttggagcgtctttaaaatctcactcgataattccagcatctccgtcatcttggcgcctgttggtcgtgttttccctggcaggtttctgttttcccggttcttttcatgctgcttaattttagattgcattctggatgttttgaatatcccgagattctaggtctttcttaagttctctggagaatgtaaatttctgttggtttcagcatttcctgatggcacttccatttcaggctctttgccgagtttcccaggccattgaaccttgtgtcctccacagtcctggctgggtcctggtgtggtctagctcagagtccaactctcacacctgtggggtgctgattagggtcagagccccatgcccagcttagagggcaccttccagagccactctgagcacccagcacttcccaggtgacccagggttcccttcactgccttctggccacagagccaggcaaggcttgcccactgtgctgtgcagtcagtcccacggccacagccgccttcacggccaacgccagccacagcgttggaacagggcaggacatgccccacgcaccctgtctggagggaggggcccactcttgggctctaggcgtctgtccagctgtggctgtacctccgcaggattgcccgggtgccggggcggaagagcgcggggttgcccgggtgccggggcggaagagcgcgggggtgccagggtgccggggcggaagagcgcaggattgcctgggtgtcagggtagaagaggatggagacagacagaatttcccacactgcctctcaggcttctcttgacaagctgtgtgcgtcttgtgctcactcccaggttttaggggtccccaagtccagactgggtagcaccagggcaaacacccaaccagtgacagaaactccagcaagcttcaaccacagactgcagaactcacccagtatgaaatagatcgtctcattaatcctagaaccattaaataactgaatccacaatcaaaaagcttccaaaaaaggatatctccaggcccagatggttttctggtgaattctaccaaacacttaaagaaaacttagcaccaatttgccaaaactctccaagaaaacagaagagggagcacttcccaactcactctgtgaagcaagcatttaccccaacttcaaaaccagtggcaaaactgaagaacactgcggggctattttctgttttctgagagtgcaaggctgggttggtgtcgagcgtcagctggtacaatccatcgcgtcagctcgccaaaaggaaaaattacatggccaaaccaacggatgcacaaatgcagtcagcgaggcccaacacacgttcatggggaaactcggcaaaccaggagaagccgagaacccccaagtttgccaaagagcatctgcagaaaccgtgcagctcaccgcagacctggctggtgagggactgggaaacgccgactcaggcagaggccttccctctcaccgccttggtccatgtcccagagccccagatgggcagcagggtgaggaggtcgaaggcacacggactggaaaggcaggaccgacccttttcctcttcacaggtggcgtgattatgtcgaaaatcacaagataaaaacgagtcgagcgagttcaccagggatttctgtgtgtggctcttgtatcctgcaaccttgctgagctcactttatgagaaatatgtccgtgtgtctgtgtagttctgtaaatattacacaatagcagtgcacatgtggaaaccgaaattaaaaacatgccgtttctgttcactcttctgaagatgaaatctgcaggcatcactaacaccacagcacgccgacaacggcaagctgctgaggcgaggcgtgggaggtctgtgtgaatggagactctgccttcgtggctcgtggggtgcagcgcagtaaagacgcggcgcggccaggtccagctgcatgtctctcgcagctggaagcagggcgctcgccgctgggctggtgatgctagtggttctgggttccgacctcagcccgcctgcagcctgtggctctccaggtctgtagtcggctgctggctgcactccctccatcgtcagagctgcctcagggagagacagggctgattggtttcttcatctttcccagaacctgaacccctcgtcttcaggttctctcttatctgttaattccgttgcttttaagcttagtaagtactttagtgatttgataaataattctattttcttctgggctctttgagcttatttttatatttaaagatttaatctacttgaaacttattttggtgtatggtatgaggtcgagatctaaattgattttttttccagatcactaaacaattgccctagggccatttatctcagaatccttccttccccgtagatttataccttcatctttattaaaacttaggcaaaatcgggtctgtattcagatcttttgttttttttaatttcatttatccttttttttgacttaaaggttttcttacctgtttattattctaagttaattttagaattactttgtcacggccaggcgcggtggctcatgcctgtaatcccagcactgaggctgaggcgggtggatcacctgaggtcgggagttcaagaccagcctggccaacaaggtgaaaccctgtctctactaaaaacacaaaacgccaggcgtggcgggagggtgtctgtagtcccagctacaggtactatagatgctgaggtgggagaatcgcctgaacctgggggatggaggttgcagtaagccaaaatcacaccattgcactccagcctgggcaacagagatagaccctgtctccaaaaagaaaaaaaaaaaaagaattagtcaaattcaaaaaaaaggtatcaaggttttattttttactgaaattacactgaagttacaggttaatctagtggaagaatctttggctttccagcgtctgtgtctgagcagggaagggcgcctcagggccgcctccctcaccgataccacgtctcagacccgcagcgtgccggggttccctttgcaggctccggtccaggcaggagtgtgtcatctgggctgccatctgctgggcaggggtcctgagtccccactgctggctccaggccgcctctccgccctcttcccacctccccaccctctctttgggttgcctgtctcgtcgtctccagggctcagagccgagctttgcaggaggagcagggaacatgaatctgcacccttttctgtctggaccggatgtcccgtgaatcttttttattcagtcaatgaagattagggttttttgctgtcggtttttaaatggatacacagtgttcgtgcatcgttatggggtgtaggtgatgttgtcttgcatgcccagaatgggcagtggccacacaggggtatttggggtatccgtcacctcatggactggtcatttctaagtgttgggaagacctcctgtcctctcttctcactgttttaaagtagacagcacatgtggctgactgtagtccgcccccactcggctgtggaacgtgaggtcttactccttccatctggctgtgcgtctgtacccactgaccagcctccgttcatccccgcccaccccacacctgcaccctccttctcccccaactccatgcgatgggttccccccgctcccgtgggtgagagcgtgcagcgggtcttcctgttttaaccacttcccttggtgcctctgaggaatcgctgggtccacaacacagtgtgaggctgccacggcagccgagtctccccgactttctctgcccctgctcctcccacacactgtcgctgctccatctgcagacaacacagccccgggcgagcttactgggcagggttctgccgaaacacagaactcgtagaatgtgtgtacacacgcacatgcacacgcacgcacgcacgcacacggagatgcttgttacagggagttggctcacgcaatgacaggcaagtcccgagagctgcagggttgggggcaagccggggacccaggagcactcatgtactggggaaggacagggatgctgggcccacacagccccggcttctgactctgggggttgctgtctcctaacgctgctgcagccctgctgtgcgccctcctggggacctccgtgtcactggagctgttggcactggccctctataagcgttgggtggactggaggaggggtgtgggtaaggctgactccgccctgccacccctgggcactttgcaacttcagctccctccccagagtcatctgcagtttctttttgttgatcaaagttaaatttcagttccaaagcaaagttgctcctgagctgatggaggaggggttgccacacactgtcagctgttttggacttgggccatggtcccagctctgcaccagcagccatgtgaccttgggttcagctctctcagctctgacatgtggctcactccaatcacggtcattgtggagggtgtgtttatagcagaggcaccgctggcccatgatgtgtgctcagcatgatggtgatggcgacgatggcggctgtggcctgagcccattggcctctgggcccgtgcaggagcccatttggtagaagctgagccaggctggtgggtagagaaacaaaagtggctcccaatgagcccattccccagtgcggtcctccctttgtgtggtaggtccccagcgaggacggcaggcttggctttacagttctgccttcagtgccagccacctggacctcctgcaccaggtcagggagagaaggcagaggagaccttgcaggctgcaggtgtccctggctccaacacaccgtgtgtccatctgaggccggggcagccgtgttggacggcctgggagcctgaggtcagaaggcttggatggaggtcctgctccacgtcgtaacagttgggggtctgggtggacccttttctctctgcatctcagcttccccatttgagaaacgggaccaccggcccaggtcctggggcagttgtgagcgtctgtccccgcaccaagggtgagcgtgacaggcggacgatctctgcagactcctgggactgaacgataggaggaggtccctgtccttgctggggaggggccggatcacggcggcatgggccggagggaactgccctgctggcaagagccgccagagcctggggtgacccagagacaggacgggtgttggaaggatcagtgcccctgccctgccacgtgctctcaccctgtgcactcattgaggcgccctgtagagaggggaggggaggggaggggggctggggccaggagtagccacagcaccagtcgccctggggccgggagctgtggtctcctcaggtgggcccaagtgcagtccaggtggggcagtggcctcagagcacagtggctttgctgaaggctggctggcactccagttaaacaccctaggcccttctctccatgctgttctttggtgttggtgttgggtaataaaggccagcaccattaattaggtgtgtaattagagttgtaaaggaatcatgggatttaatcacagggtttgcaggtgagcggggtagaggaagggtaccaccctctgtgctgggcacacccgcctggctgcctgcaaacagatcctccctggactgggcgccccccatgccgtggacccggcctgggcctcggagctcctgggcagtgcggagggctgaagcaccgtccccagtggcgtgactgcggttgtgtgttgggaacatgctcgggggccccaagacggagccgagggaggatccagacagacgctcccagaaccaggttctgcagcaccagtgagaagtcagcagaggtgtggggaggggactgcgctggggctgaggtcccagggctgggacacaggtgggcctcactgcagcagggccagagaccaggctggggcggtccccactgggccatcgtggggcttctgggctccatcctgagggtcacacagagcctcggaggcattctgtcaatttggaaggtggcctggctgcagagtggagcacggtccggggcaggctgagccgggcgctggccgtggactgggcagaggtgctggtctgcgaggtggggtgtgatatgtgggcccacgattcaggttgtagggatacagcgctgcctgggcccctccccagccccacatctagtctgctgggctctgggctgaaccacagggtggggcctgatgcaacacagtcagggccgccctccgtccccgctagcccttctctttgctgctctgggggctttgtcttcctggggaaccagagataggtaagaatgttcctggcacagccaggtggccccacccttcctgctgtgtctggcagaagtgcccaggatgacttctctgtcctggctgtgcacggccacacgcccgggcagcgtgtgccagccacagggactgctgaggagccctcttgctcttgctacggtccccagccgtggcaagcagctccgtcgccgcgacacccttcttctctcctctttctttctggcacgtctgtaaactttgcttgtaactcaagccaagtacccaattagggatttcttcacagttgcatttaaacctgattgaagtgggagctcttcagtgcctgacacatccaacaggcgcttcccctgagccccggccaggcggtgctgagggcggagaggggcggcgctgctgggagctctggctgtctggaggggaggtgcgcccttcacccggggtgggcacccagccctgtctcggcccccatgtccttatctctggtcaggggtgtggcccctcatgccccaggctgtcatgaggctcctgtgagcacagcgcacgtgtgcagggctgggtggtctgcatgctaggtgggcagccgagcgggaggcccatgtgctggcagtgcagggcgggtggctccatgccgcggctccctcgctggaccccagcgccaagcccacactgttctgtccgtgtgtgttctgagcatcgcctggacgctcggccctggggcacatggatggagggaactgggtgcctggtccagggagggtaaccaacctcgagctgtgggcatccttgtcctggaaaagcaggaggaaaactgcagtggggagtggaggacattcctgtcacaagatgctgtgatgactggaggacactggagaagccgtgtcctctgccagccccagcctcggttctcgttggcatgggagatgtgccagggtcgtgcctcgtaggtgaatgggggtgccctggtctcgcttctcgctggctcgggagatgcgccagggtcgtgcctggtaggcaaatgggggtgcccgggctgttcatgcagtggagttcctgggagcccagcctggcccccaccgtgggatcgggactactgtcatttctactcatgagggaggggagctgcagggaggcaacaagacacccgcagcacagggcatggacacgaattcatctccccgccagtgatcatcccccaggcctggcctgggcagctgctgactcccttgcagggcctggagggtatgcgtagtccgaggggctaagtcgagtcccttccttgagggctcactgtctgctgggcgtgtgtccccgcctcccccgccatgcctcatgctctggcgtgtgacttgctcctctctctataccgcccagcgtgctgtccccgcctcgtgccatgacgtgtgttttgctcctctttctgtactgcccagcgtgctgcctagcacagacggaccacaattcactcatccagtcctcagctgagggacgtctgggtggttccactttttggctgtcatgagtcatgctgtggacgttgtggacgtttgggtacaagtctttgtgtggatacagttttcgttcctccagacgggaggggaatttccacattctagggaggagaggagctgccttacggtttccgaggcggcttcacccgtttgcatgtcccacgtgaggctccaggggccccacaccctcccggtgttggtggcatctctctttctgaccacagccccactggtgggtgcggagtgtgtggggatgcctgcacttcctcacaggtgaggatgatgggcaccgacgtggcttgttagcctctcctaggtcatcttctgcaaaatacctacttaaatccctgccattttcgactggattgtgttctcatcattttctcaatgctttcttttgataagcagttttaaatctcgatgaagtataacgaatcactttttcctgtggtagtgatggtggtagtgctttgtcccaagaattccctgctgaccccagtgttgaatcgaccttagactaagccccttatcccgctggttctgttcgtggcgtgaggggaggtccacatctcactgtctccgtgtggacattgggtcgttttggccccgctggcggaaaagacttttctttccccgtggagttgctttcacttgctttttgaaaagcactcaacgctgaacatttcgtcctggctgtcttctgtgccggcgacacatttgcttgtacccgcagcagtcccacgcagccgaccatcggtccttccttgactgtgagacttggaggcaggcagcgtgcgtcctccagcccgccgtggaacaccgctccgcgtacgtcccgcgtcggcctcctgtggcgttcctcgctgcccctgaccgtcctcagcacctctgcctgcgccgtcccctggccctgcagctttctgtcccgggaagcgcgtggcttttcccctaagtctgccccaggtctccttcccagccaggtgctgccaggacgccttttcggaccgcagccctccccctcccatctccccgtccctcccggctgcggttctctgtagcacttccgctccaaggtgctactgttgcacttcgtttattttttatctgtttccctagttgaaaagcaacatccattagggcagggggttcatctctccatacacactgtgtcctcagggcctggggtgttaccaggcgcccagcacctctccacacatacctgctgggtgaatgaatagctgagcagcgcttctgaggaccctggcaccagggttgctcccagtgagaccccagttcctgctgctctgtggcccagcagggagggctcggctctggaaaaccggaggcccacactatccttagatgccaccgcatgaggctcctgttgctgccatgacaaaccagcactgactgagttactcaacacagcagggccggcgcggcactcatgcctgtcatcccaacgctttgggaggcccaggtacaggggattgccagaggctcggttggagaccagcctgggcagcatagcaagaccctatttataaaaataataataataataataattagccgggtgtggtagcacctgcctgtaatcccagctactctggaggctgaggcaggacaatggcttgggcctgggaggtcaaggccacagtgagctgtgatcgcacccctgttcgctaccctgggcaacatagtgagaccttgtctcaaaaaaacaaaccaaaaactcaacacgatgtgatctcgggttctggaagtcacacgtttccctgggctaaaggccaggggtcatcagggccggttcgtttcagaggctctggggagaatccacatccggccttttctggctcccagaagcacccacgtgccttggcacacggcctttcctccaccctcagagccggagcgcacatcttcggatctctagccgactttcctgcctccctttctgacgtgtgaagacccgcgtgattgtagcgggccaccaggataatgcaggaacgcccgtggtctcaccatccctgccccggacacatctgcagagtcccttcccacgtgcggtcctgggcccaggcataaccaccgcttgctgatgcctgtctggtctcctgccacccatcacagcgccatctcctccttccgactcccaggtcctgaggcctccaggccagcactggccaggggagggggctgggaagagccagtgagggcgtgtggcagagtggagagtatgtcccccattgtggggtcgggcctgggacctggacgcggtgcctgggcttgcaggagaggagaggtggacaggcgtgctggggggggagacctgcccacgctgccctgggagcttgtctaccctctcctcccccagcgtggcgtccagcaggacatggggcgttccctccagcgtggccacccaggactccaagcagggcccaggaggaactgtgagggggcatgactgagtctgtggcgtttcctgcaggattcttcccataggggtgaagtctgtatggcggaggcagccagggagcctcccctccactccccacggaatccggacggcctgcattgcagccccagtggctctgctgtgtccccgaccagctgcttccctctcagcctcagctttgtcctgggggagaggccactgggggctgctctccctccccccatagcagctgtaaatcatgaaatcctcatggtgtcagccgagggctccccctccccgccacttctagagccagagcccctgcgaggtcccaggttgctgaccccacgccaacccccaggacgccagggccatctccaggacctgggggagcaaggggcctggctgccgctacagctcccagaaggtaaagcctttggcctcagagagcctcccccgacggttcccactcccttcgctcccttctccaggccgggcgtgcacgcgcggattcctcctcatgcagagcccgtctgccctgatggatcccccaccccacgccaccccaggccgcttcctccgggtggagtgctcctcagcactcaggggtcctccctgcacccaccccgcccagaaccctgctccttgcccctctccttccagagccctgtgtctggctgctccaattactggagcagttccgtgtcctcttcccgagtctcctgctatctgaagagttcattacataggaatccgaggcctcgctgcctacattagcaggttttcatagactgccacatctccaaaaggggaaaagagacaggagatttaaaactctcgtcttgccgaaagcagacagattgactcgaaaatgacccagtcaataaaagatgagctctggaaaggcttccctcttctcagagggggctcgcctgccggggagctgaggttctgcaagcctcggtgggaaattaatcatgaacgcggcatgcaaagcggccggagcccacacagccccgcccccacgtctcccaggacctcgccgccgccaccccaggcctctctccacggaccagctgctgggcatgttcctggagggaagcttccggaaacagatgaggtggccgtgttctgtggtcacgtcttgactcggctgtgatatcgctgtggggcactgctccctctggagtgtttctggctctgggaggtgcgtgcgcggtgggctccctgcctgcacaggggccctggctgtgggcctgtgaggctgggtctgcctggagctggtgggatgagaggggagtgctctgaggaccgttcccccactggtgcagggatggggagcacagggtcccggtggctctgatgcatcggcggcagggaccgcagccctgcctgtgccaggaggagccgtgagaggatgggcgccccttgccctctgtgggctggcatctccgtgcagggcctgcagtctctgcagtggccacccattcttatctctcctggtgcccacacctgccgcctgcctcacctctcccaaacaggaggagtcacctctgaccccaactgcttccttttaccagagtttctcagctcatgttccccaaaaggataggttaagttttccttttgagccacacatgcccccatttgctgtctgtctctcagatggccatccttcatccagtcgacagggctggccttgcggtttccactgctaacacacacggagctggctggttctggggtctgtacccgcacgcagggcccctgccgccatctggacccctgccaccccagtttcccccacttcaggattttgggtcagaaggaaactatcccgacagctatgtgtactcctgcagacttctgggtttggccatggttcccgtcagcccccagacccccgacaagtgtctgaggggatgtggaacccagcccactcccaccacttctgccctgcagctgcatggagggcgggttggacaggtgaggcccagcccctgccttcaggcagctcacacagtgagggaagcagccctgcaaaggtggccgcagctggaaaggcgtgtgtgtgccgcagaggttcagacccagtccaggggagagggataggatgcccaagaggggcttcatctggaggtgacgccggactggagagggttgggatgcccaagaggggcctcatctggaggtgacgccagactggagacggttgggatgcccaagaggggcctgttctggaggtgacgccggactggagagggttgggatgcccaagaggggcctcatctggaggtgacgccggagtctggccttgcagaagttcactggtgaagatcgtcccctggcagaaggcaaatgtgcccgccacattgtggcagcagaaatgagcaccatgcgttctgagtgtgcctggggtgtctgggaggactgtggacttgtagcggcagaggacagaacacctgggctgcacacgagtgactgtgctgggcaatggcgcttcccttccgaagctgggctctgactctgcaagtgactgcgccgggggcagtgctccccttccgaagctgggctctgcgtcaaaagaaagacccctggggcctgaggaggagggagaggagggtgacaggaagtagaatttggactctagtaaagaaagaccccgagcagaggtggtgccagggagggttggtgaggacagagcgttgaaacctggtgtccagcgggtgttgagtgctgaatccaggaaggccgaaggcaactcaagttgtctggctcgaggggtgcgggggatggagggagaggcggccgcccaggagcgggaactgtgggagtagcacttaggacatgaggcacgcctgcagttatgaatcctcacggctaatcagggctgtgggcacaggcagctgaggccacttgaaaggactgatgcgcccagaccaggccccgccagggcctccggtcacgggatgggtgcagggttgggggtcaggagagagacactgtggccccacatcgccatgctggagcctatgtcccgcctgactggcgtcacagggagccctctccctgctttctcatcgtcggtttccccatccagaaggtggggacaaacgtagccatgctccccagggcggggcccggctgggatgggtgcagcgaggctgcgtgttcctgccccggacaggcacctactcaaagcccgagcaggctctcacctgacgaacgtgttccaggtggaagagaggccaggacacgggcaaacacgcgatctcagatgctcgtgagctctagggagaaagcaaatgtggggtgcccagaagaccactggtgggggtggcccagggaggcttttctgaactgaagcctgaatgaccaatggagacagctgctcagcccccagggcagtgcccagcgtgggctccagctttggctccgcggcgggtgttcaaggggtcccctcaacagtgctggcatcgcagaggtggccctgtgctgacgcgtcggacggctgctgcgaccagccctccctgtagtcctgttgctggccagagaccgtggagctggattctggcctcctgcaggcatctctatgtccattcagcaggtgccacgtccccccacatatgcagggtgtccggaggatcactgacacgggggccaatgtccctccttccgccaaggttccgctgggcctctgctgccgaaggaccccatgggggctgtggagcctggtgccgggggagggggctgtcccttggggttcagctgctgtgttctcggtgctgggggaggattcttctccaaatatgatatccgcgcccgcctgtcaccccaggactctcccaccccgtaatctggtggctgtaattgctggtgtcttttcatatcagttttgtgcaaggtgacaagctgcttgctggagtaagtcgttaatcacacaagaggtgccctgtttgaaagctgcacagagctcacccagccagcgcctgccaggtggtgggccagggagcggctcctccgtgtgtaattccagggcgagtgtcttctcactggagcagagtgtgcagtttctgcccagcaggggaactcatggctcatcatggaggccgtgtctcaagggccgtctggtaccagcagagttgaagcgaccatcttcttggggcagcagcaggccctggctggcaggtggtggcgtcccatcctcctgttgccaaagccagttcctggggaccatgatgcctgccagcccctcgggctggtctccgggaatttggatttggggccggcagcccctgggatgagccaggtggggcgctgtggggcatgctggggtacggttctcacgggtgacatcccggggggtcccggccagcctacaggtgcgtccccacctcctacagtctcttgcagagccagccaggacccggatacaaatcgcacagccataaccactgcaatgccccatgcccatggctgctaataaaattgcatcaatatttgatgcctaattattaaatatttaaaaatgtaaaactgaaatagtttagaagcttgcaaaacatgaataattcagtcccgggaagcctggctcggcattgggcctgggcaggaccggggctgccagtgcctgccagggcccagagtactctctgcagggacactcgggcggctcccccagccctgggcctccactggcttcctgtgtccgcagcgtgcaggggatccttggtcgtctctcgtcgaggtcagacctcggcctgatgtggaggcctctgcgtcacctactagtacaccacgccggtgtcgggctccttcagaggctggtcccgctgctccgagtctgggcacgttccctcctgccctgtgttcccactggcactgagcatctgagagtcatctctgacccatcagacccatcctagagggaagatctggagatgccaatgctggcagcctcccagaaacagtccagcaggaccccctggggccgctgctcatgccaggcgcccagccgccgccagggagacatctaacgagaggtgggaaatagacacttgggggagccaggccgtgtggtgggggtcatgagagaaatgcatgctgggggagtttcataatgttgagaacagagacacggctctgctacttccggggagtgagaaccagtcacttgtagaagaccagaagtcagaacggattcaggcttctccacagcagtgctgagcacttgagacctgagggcgatgccttcagcactgaaagagaggccgggtgcggggctcacacccgtcatcccaacactgtgggaggcacacatgaggcccgcaggtcaacaacagcctgggcaacatagaaagaccctaaaaatatatatattagcccagtgtggtggtgtgctccctgtggtcccagctacttgggaagctgaggtgggaggattgcttgagccccggagttcgaggctacagtgagccacgatcgcgccactgcactccagcctgggtgacagagtgagaccctgtctcaaaaaacaaaacaaacacaactgaaggaggagtgtatacagcctggaattctgcatctggccaaattacccatcagctctgatggtgaggtagagatgtcttcagccatgcagggttccagacattgttccctgtctcacgtcatcagggacctgctgaagggtatgatcgcgagagttgcggggcagctgcagccctgagccaggtggtccccagttccagctgcagcagcctggacagacttgctgggcctgtcatgctggaatcccaacctttgagctgggaaaggtgctgtgcccaggctgtgctacatcgttgggaccgtgtgtgggcaaacgtactgtctggtcacccatgtctgctaagagccttcatctcacccttgcagggtggccctggccggactcctgagctctggggtcacgggccgctgtctcctgagggggccgcacactgcaggggccggggcggtcaccctgtctctccggaccatgctcaggtgatcttttgggtgtccttgcggcccagaccgcactgccccctcactccacacctggactcaggcccgccactcagatcccgcgccgagcacccgtgatgtccgtagacagccaagtggttgttgacgacacagggatgtgttgttttaagaggaacacgttattgccgagagggttttcgcctccactgtctcactgacccgggggcaggtgatgtttcccccactcctgccacacccagggaggaaagggggcttagagagatgaggtgacttgtccgtgaacgcacaggcagtgtatggagcctggaatcactcccttcctcctggccccgtggcggcgtcatcagtggggccgggcctacgccgagtaggattgtcctcctggcttggcctgggcctcaggggctgccttgtttaatggtgaaatattagtccctttttgtgggttttttaaagcctgaaaatcccaacattggttaactgtatttgattcattgtttagaaagaaaaatggctgtgccgtgagtccctgaaggaaaagttccgaagctgcctccagtccctaaatcgagagttgctgcagagtctggggcttggggtcctcggtggcagctgtgcagggcccagacccaggccagctcctcactggggcaccggtccaggtcgggcaggagctgggggaccgtgggacaggggcaaggcggtggcagtggggagatagtggggatgggggcgtggcaagggctgagcagctgggagctgctctgaggccatgggtgccctcaccgcccctcgcaggctgaagcccctggaggcccctggctctcacagtgaccctgttagccacagcagggatggggttgggggcttgggggcggggcagtggcatggcctctcttcggcctgccttgattttaagggcttttcatctgaggccatgggaaggctgtatgttcagggatgaacacgggtgttcagggacagacgcacacgtgttcggggataaacggacgttcagcagtaggcgtgtgtgtcccgtccgctgtgtgtgtgcttgcttgtggttaagctgactgtgtagcttgcgcaggggcaggagctcaggtctgtaggggatggtggcttcgctcacctgcgtgttcaacacgcacccgtcgcgcacttccatgttccgggttctcaggtgcagggcaggtgtgacagtgcgcacaggcctggcccagcccacctgagctcagggtgcgccgcagggaaacagcatgaggcccagttgcactgcagggaaagagcgtgaggcccaggcatctcaaacagctctgtggacgccacaatctgtgccctgcaggaaaagagcatgcggagaacaggagccagagactggagcgatggagaagcagggtgcaggagaggcagctggaaagggagggcggctcagggccctggggcggggctgggaccaggtcaggctagggccagatgcagctgcagtggcagccaggccggggcacccagcagggcatgaatatcccaggagagagccctgcctcagctcaagtcttgctgtgggagcatggagatctgtctgcatggccggggttatcctggacggggtagcaggagcggtgttggcatacacaaccgaggccagcctgggaagaggctgcttggggttcggggaccctacagaagcaccagggctggcgtctcttcctcctgtggggtcttcccacgtgggccagctgcctcagctgtgcaggggctggtctcctcagggcagtgctgcctggtgcctgcgggtgcttggtaaacagctaggccccggctctttttttttttttttttttttttgagatggagtcttactgtgtcacccagcgtggagtgcagtggcgcaatctcggctcactgcagcctctgcttactgggctcaagcaattctcctgcctcagcctcccgagtagctgggattacagatgtgcgccaccacgtccggctaatttttgtatttttggtagagacagggtttcaccatgttggccaggatggtcttgaactcctgacctcagataatctgcctgctttggcctcccagagtgctgggattataggtgtgagccactgtgcccagccccaggttcctcttaaaatcatcccaggacacagatgggggtcaggccggcctcactcacgggagaggtcccagagggaggtcacagagcccaggcccacagagctattccaagcacctggaacagtgcttcaccaatcatgaattccacaagagcatcttccataggctactgcgtcctcgctgcctggaacagtgcttcatcaatcatgagttccacaagagcgtcttccataggccactgcgtcctcgctgcctggaacagtgcttcatcaatcatgagttccgcaagagcgtcttccataggccactgcgtgcttgctgcctggaacagtgcttcatcaatcatgagttctgcaagagcgtcttccataggccactgcgtcctcgcttgcctggaacagtgcttgatcaatcatgagttccgcaggagcgtcttcaataggccactgcgtgcttgctgcctggaacagtgattgatcaatcatgagttccgcaagagcgtcttccataggccactgcgtcctcgctgcctggaacagtgcttcattaatcatgaattccgcaagagcgtcttccataggccactgcatcctcgctgcctggaacaatgcttcattaatcatgaattctgcaagagcgtcttccgtaggccactgcgtcctcgctgcctggaacagtgcttgatcaatcatgagttccgcaagagcatcttccataggccactgcgtcctcgctgcctggaacagtgcttgatcaattatgagttccgcaagagcatctttcataggccactgtgtcctcactgcctggaacagtgcttcatcaatcatgaattctgcaagagcgtcttccataggccactgcatccttgctgcctggagcagtgcttcatcaatcatgagttccgcaagagcgtcttccataggccactgcgtcctcactgcctggaacagtgcttcatcaatcatgagttctgcaagagcttcttcaataggccactgcgtgctcgctgcctggaacagtgcttcattaatcatgaattctgcaagagcgtcttccataggccactgcgtcctcgctgcctggaacagtgcttgatcaatcttgagttccgcaagagcgtcttcagtagcccactgcatcctcgctgcctggaacagtgcttcatcaatcatgagttccgcaagaacgtcttccataggccactgtgtcctcgctgcctggaacagtgcttcatcaatcatgagttccgcaagagtgtcttccgtaggccactgcgtcctcgctgcctggaacagtgcttcatcaatcatgaattccgcaagagtgtcttccgtaggccactgcgtcctcactgcctggagcagtgcttcatcaatcatgagttccgcaggagcgtcttcaataggccaccgtgtgcttgctgcctggaacagtgctggatcaatcatgagttccgcaagagcgtcttccataggccactgcgtcctcgctgcctggaacagtgcttcattaatcatgaattccacaagagtgtcttccataggccactgcattctcgctgcctggaacagtgcttcatcaatcatgagttccgcaagagcgtcttctgtaggccactgggtcctcgcttgcctggaacagtgcttcatcaatcatgagttccacaagaacgtcttccataggccactgcatcctcgctgcctggaacagtgcttcatcaatcatgagttccgcaagagcgtcttccataggccactgcatccttgctgcctggaacagtgcttcatcaatcatgagttccgcaagatcgtcttccgtaggccactgcgtccttgctttctggaacggtgcctgctgctgggtcctccttcccactgcaggacgtacagcgaggctggagcctgagacagggttccctgcaccctgaggctcacgtagcccggccgacctggttctgcatgggtatagctcaggccccggggaagggcggaagtggacaggcagtgccctggggctgcactcctaagatccgtcggtacctttaaaaggttctctgcttgctctcatctgcgtgtgccccgtaacactcgaaggagtaaagaggatgtagagaaaagtaccgcgttttccttttccctccttctgaaaggcctgggccccggcatctctgtccctatccccgtgggtcacagctgtgtgctggctctccctgccctgccaaggtagaagcattttctgcgtttcaggctgtgaactgggcctcttgagataagtgctgtaaatgctcctttatcctgacatcccggccctcagtactgtaaagcctctctttcctgctagctagcctttacctaatggagcacaatttatttttattctgtcctcttcacagctgcctcctgtgattccaggaggaggcaggtgtggggctaaggtggtgagggggtggctgttcaggcaccagtgtcgtggatgccttcagccccctggtacaccccactgggccgggccctgggcagccgccgctgcatcctctctgactcccacttgaacacctgctgttcttcctcctctcttgcccctcaccgaggccttgagagcccatcagtaccaggcctgtgtccctgcatccctgcaaggtggtagcaggtacctctaagagggccggttctgcccaaagcaggggtcccaggggtgtggaggaggggcccgaggagggccggtatctaggcagaggggagttgctgcttcctaggcaggtgctcctggtcagtgtggccagagttcaacatccccgggcagggaaggcaggagccagggctgtgggtgggctgggctcaaggcctccctacggtttggctctaagcctggggtagccctggaggtcagcggagagggcctaaaagccttggtgaggccaccccagagagcagggctgcagagctgggctccctccctgagcacccctggcccagcaggccttgagcacacagcgagccgggctgggcaggggatgggagcgctgaaggctgcaccactgtctcgcctcagcccatgcactgctgttgcaggtcgggcctgagaacagcctgggcagtgcctatgtggtcccagggctggggtcgggcacagggctgtcgcctctcaccctgggggtctctgccactggcttctggggtctctgagaggagcctgcccaggatccaggcccatagaacccagtccagaggaaccccgggctcttggctcacttgggaggagaccacgtgagagcaaccgacaagaaagcaatgacatttccaaggcggaaaacccatcttttatttatttaatccaaaccatcgtgtgaattattcattcacgttgatgtaagccactgaactacagggataaaggggggtcagaacgctggcttgatctgccccaaactgaaccgactccgtcgaggcagccttgtctggaggatggacccttccctacgtggacaggagaccaggatcagggccccctcacctccgagggtctgtgtggcatggaggatggacccttcccctccagggccctgggtttgtctgtcagagggtgagagagtggccccaggagtgagtgcggcggcccatgctgctcccagccgcatgggtggtggtctcgcctctgagagggggccccacacactgccttcctcgccctgggacctcataccaacctgctatgggtgggcaaacacagcctggagccccggaacttccagaggtctgtgagcggcacaggcagctttgaagtctatcggaaaacagggctgtttccttctccaaggtcaggcttgcatttattaccaaaatctaattcttcccctttggacgcctgagatctatcaaaggcagcacgggccatgttagggtgaaatatggcctctgaaatgtggtctctgcgttcttccttgtgcacgtggcaattcctgctaccgatagccccatcttcgggaggatcagccgagggacgcagggaagagtcttggggtcagagctgccaattagccttcagatttcacagcctgattgctcgattcatcaagggccccagcctcgtcctgctggaggggctgggccgtggaataacagtgtcccccagggccgtctttgccagcaacggagggaggaggccaggttggggcgagggctgaatcagtgccaatgctgccatcccacaggtggatgggcgccagggcccctctgctgacaggcctgcggttgtacaggccccatatcctcccagcccctgacatctggatgctgctaacgtggtccctgcaccgctgctccttccagaacccatggcaggcagcgcccttgcttttgcagctaagcagcgagtctctgtgagcctgggtgtcattgtgtgtggattggggatcggatcgtgttcatagctgtcatagccaggcagtgagtgagcttgcactcggaacgggctgctcgactgagctcacgccatcgggggtgcccagcggccctgcgctctcggcggtggcctccggcacgtgatctggcctaacacctctgaaggcagctgcctgcctgtgtccgtgttgcaggcagaagtcctgggagatggggtgaaggggtaggttcagagtcacaggtcagggaggcagagccgagctggaaccgcggcccctcccgcgtcctccatcttcctctgcagacttgagggcttctggtttgcacctggctcccctgtccctgctcacctccaggaagcaacctggactgcatcgtccaccttaaactggcccatcagagcctcttcgggccgctgtgcacaaactccccggcagcccctctctcactcactgtgacctggccagcaggcactcacactgcacctttcctcacactcccctagagtggactgtgggggaccccacaccctttctggggccttcagactcatctctaactcaggaccagcctccccccgggcgctgcctggagttggaacccttgttctctccaaccatatggccatggttgactttaacatcctctttctcagcctagccagggagctgaccatcccgtgcctggttgtgggcgcctacagcagtcctgtgattcagtccctcgtcatagtggagggaggctagcagctggcccagctcccgtggcctgcaggatagggtccagcaggctcccgtccccgcctggagcagtcccaggcccctggagggctccccattgccagctccagacagcactgctgggaagcacccggcctaggggacggctctgtgtgcgtctaagtggagccagtcctgataattaacgcggggataaatcgaggtttaactacttggaaggcctctcgggtgagaaattcatgataatcgctgttatcctcctgatggctctgcagagcagttcctccccaagcagccgtaaactctgacgggcagggtgtggggctgtaccctgaatagtcacttagagccatgtcaggggcagtgggcctgggggtgccggctgtcgtctcacgatggcctgacctcagaggtggctggcaggtaaagccccggggcagtaggatccggaacgtcccggtggcctcctgcctgcctccctgtttgtcggtgctggctcctgtggggtaggcgtccagcctcagaaaggacccaggcggcaacctgggaatggatggtcaggatcactgggtggcgtggcagcccaggccttcgctttgggacccacatcctcagcaccggctcctcacgcggttctcgcctaaatccccggagtgttggggcaagcgaaccccgagtcacgcctgaccctgtggcttcctgaccctgtggcttcctggcagtgactgtgctggctccaggggttgtcattctgcaggccgagggctgatccctgtggaggggccctggctgcttgtagtctggctctcagagttaccgttcttaatgcagtaactttattattgccaccaccagagggtcagccgttatcagctcacccctcactcccgttccctcatgcatgccgatggaggctggctggtgtgacacgggggcttgctgtgtccctgggcagccgccactcccacctgtactcggcttcctccctgccctggccgctcccgggtccccacccctccggcctggtgccgcactcactgtctccttccgtccctcccgcagagctgaagaagcaggtggagagtgccgagctgaagaaccagcggctcaaggaggttttccagaccaagatccaggagttccgcaaggcctgctacacgctcaccggctaccagatcgacatcaccacggagaaccagtaccggctgacctcgctgtacgccgagcacccaggcgactgcctcatcttcaaggtgggtcctgcgtgtgacggctctccggctgtctcgctctctgtctcctcctgtggggagatccgaccgtagccctcagcaaaggagcagcctcgcgtccaaaggggatggtgtggagggctgggcgggaaggaggtgcactggcccgtcctcgtcaccccctgaggcttctcagccttgggccaaccctatgtggctttgcagccctggacctcctgggtgcagaagaccctaggctgtccccctgactttctcagcctctgtctgtcgcaacttgggcttcgttccatgagggctgcggccgtaggcgtgtgtgtcagtgtgtccagaggcagcggtgcctggggaggactgaagtccgtgtggggccggggcaggggacgccttccaagatgccaggctgcgcagtgggacagcgcagtcccagaagccagcacagggcaaggtagacagactagaagaggaaaggagagccagccgcatctctacactcgcgtcctgcgagccagcaggcgctcttctggtttgctggtgaagccagactgggtccaccgttgtggacatgaagagtcctcgggcgagcggggtccaacagcagaaattggggtgttatgtgttgaccctcagggtggaggtggccccacttggacctccagcagctggagacccagggcaacaggggcttgttcatcactgccccggtgagctaacctccggtttgtgaggatggtgccgtcggcctggtgtggcattgtggccccggcatgacctcgtggccccgtcttggcatgtggctgcttcaggaagggtggagggggcggtggctgtgggagatgaggacaggcagagacgggccccacctgggactgctgtggtctggaacgggcgtctaaactgcctgcagtctgcagcctctgcgtgtctttatggaaccgagaaccaactttgatttgtataaaagctgtacccagtgcggcctacgcatgtccgtcagcgtctcacagcggtgagccgctgcctgtctgattcagccttagcccggctcttcctcctccttctgcacaacccgcccgtcttcacagcctgcgctgcacgggggcaccgtgccgggcttgctctgcgttccttgtggatttcctgcttctcagatcacagtcatccatttctacactcttgaaactctcaaacctttgaataataaaaacacaccaagtctttaagctatcagaaatgtacttcttcgcttttgtataattctgtatactttgaataattcacagaggtgtttaatgcattatacgaattccataggtttctaaaatgattaggtattaataaaggtgtaccatgaacagttatcacttaacatatcactcgttacatcaacatttacaaattaagaggcagcgttttccccggatccctgcgtgtgctgtagttgaagcgaatcttaggaagactaactgcagcggaaccttggggcaccctccacagtgttttctgttgagagtgtcgaaaatccaaaagagggaagcaagccactcgtcatcttcccgcgaaaggcggccgctgtcctgcttcgccgtgtttcctttcggtgtttcatacgtaggcacatgcctaggcatgttcatttacacctgggaactcgggatcctggggttccattgtgtgtgctcctgtgtcactttttaaaaacaccgtcagcaagtagcatcttgaccactgtaagccctgcatgggcttctgaagcgcagccctgcccaatgtcctcaggtttgctggacaccaggtccatccccgtcataccctcgagcatgggccctgccgctcttcctgctcgagccagcatctcagctcccccggccctcatccgcccgcccaggatcccagccatggcaggatgttgagaccagaaggcttgggctggcctcagcttgccagtggccggactttcagcccccatggcctgggcaggaacccctgccctcctttccgccttggagccctctcagcccccaggctcctgaggtcagggagaggcaggaagggggccccaggaggaggaggcaggcggacagagagcccaggagctggccagctccccagccctgctcgccccaggcctaaaggacacacagcgtacgggaggccgggctcgccctgaggagccgtggttcctgcaggggtctggcctgggccccgcagctcttgccaggcatcctgcccgccttcctagactcttgtgatctggagccttggcgcctccccaggccgccccctcactgcccatcctccagcccttgctgtcccttctttccagtggcaggcctggcctgacctgaccttctggaccacggcctgtcctggcccaaggcccgtgtgaatgtgactttgcaggtcctgagggctggatgtgctgggtcagaagccatggagctgaggcagccgcctccggaaggacagacggtccactggcccagtgctccaccagcaaggcctggtgcccgcagaggccccgctccccacccttccggccacccaccatgcctgctctgggccgtgttccgggggctggctcaggtggacagtgtcagggaacgaggttgcttttagcttacccactttccccatgtgtgacatgcactgtgttttcatgcttgaagctcacaggatcagggagattaagtaaagtatggaagggctttacaagttgatgtttgcaggcggggctgagagctgcggggtgggcctggcatggggagctctgggcaacccaggcagggggctgactctaggtgagcttgtgggctggtgcccaagtgcagctgttgccaggggggtgctggctgggcctctgcctcatctgtaaagcaggtacagttacgtctgacccacaggagtaagtggggccatgttcctggcacatccatcatggttgccaagaccccaccttggtccatcggtttcatttctgagcagtgaagtccccgcaggaagaagctgccaacttgtgtctgcggttttccctggaaccccagcatcaaggcccacctgctccatcctcttcacctgggcccagctcgcttgtagacaccttctccaggaagccctcctgggttccccagatgtgggacccttcttccgctggcttccctcctaggacacgtgccaccttgtgtttttcctgacaggcgagtctgccggaggttttatcctgttgggttcgttgtcccttgagggtccccagggggcctaagtgtgcccctcctgtgtttctcccccactgctgggtgcctggttcttaaagatgcttcttgctccatttctccctaggcttcttttcacagcctctttcccccagcctcacccaacccccaccctctactcctgctcttcctcctccctctcccactcctcctccagactctgtcctgcccagctgatgtgccctgctagcagctgtgcctagcaccccgctcgccccctcccctctttggagggctggggcctcccagaccttcctgcgccccatctggttgatgtggagggatcgcctgctggatatgggcctttagagcatgttcatgagggctgacactgggcatgcagcctcacctccccaagtttcagtctcctcacctgtggagtagaagtaactgtggctcacttcggaggctgcaagaggcaagtctcataagtgccacctgtggagctggggaggggtcatgttgcaccgggatccctgttggctggttcagctccagcccacggtgcacccgtgcttctcccagagctgtgactagctctgccggccctgtgtgtcctggtccctgcagaccttctggagggcctgcaacatttagggagctttcaaaggctccctgtaagccgactcttcccaagtcctcctccgagctgcccttcactgggtgaggccgttggcctcctgagaaatcctcccccttgggttccaagaagacagcgctagagctgccaagtcttctggcaggagctctgaccaggagatcagcatcagtcctgccccatccacctgtcattcctgcctcctttgtatccaggacaccaagcttggtgacaggagaggcacttgtactgttcgcagcagctccacgcccccagctcagggcctggcttatggagagggcagtctagggctctgccagacagacagaaaaacaggtttcagtggagcaaaagggaagagacaaacagtgaacagacaacagccaacctgtagggccagggctcatgttggcacctctgcctgcagatggtcactgactccttggggccatgcagcggtggccctggtctccactgtccagaggagagataagagacactgtggagtcaccttgtcccgggcagctcctgaccctggtgtgcagccttggccaggccactgcactcctgtgagactcagtttccccatctgtcatgaggaatgtggtctgggtgctccctgggggccctgaccctggcctcctggcttcagaaaggcatcctcagggggctgagcatcactaggtgtgcccaggagggtcttccctgagctaccctcctgagatagggccacggagggcagaggccagtgtgggagggcagggagagcagggagacaggccccctgccccacccactccacctgggggctggcatacgtggctcccgtgctcctgaaagatctcgccaaaccccagcctcctggccatgtcatttattttatcagattttcccccaaatgattcttcaggcagaaagggggctgcagacagagttagaaatagccgaagccgtttccagtcaagcgggttccacagatgtgtgctgggataattgagggtttgccgcacagtcccccgccactctgcttcccatcccagccaggacttcccatcccagccaggacttcccatcccagccgggaccaaacctcttgttgccgcgtgggtggagggagctggctgcctgggctgccgtttgggggaaaggcaggcaaatctcagctccagctcttcccagcgggaacctgctgcctctgctcctctccctcctgagaggggatagagattccagagtccctagagcttcctgggaaggccatactctgcctgggcctggagcggggaggctcagctcctggtctctccatcccggctgcactcctcccagtggttctcacggaattttccccacctcccttttcccctcttctcaaaacccagggaaggaagccttctgttacgagagggagaaaatcagtggtaagaagaagtggagtgaccaggccggggacacagagcaaatgcagtttggggcaaaaccgtgagcttctgggatctgggagacacactggttccagcaggctcctcattccttgctgtccagggccttccccggctcagaggcctgcagggtgggcgtcagggccagaggcgtggacggcacagattccggaactgcacaaacatgtggcgatgtcgacctaccgggtttgtcatatggatgagggggaaaggtatacaggtccagcctccccgattcgaaaacctgaagtcgggaatgttccaaaatccacagctttttttattgtgggtctgtcactcaaaggaaatgcttaatggagcgtttccgataccagattttcagattagggatgaatatttgcatgagatgcttactcaaccagtaagcacgtaatacagatattctgacaacctgaaaatctggaaatcccagacacttggtcccaagcgtttccaataagggatactcagcactcacctgtgtgtatatgtgtaagtctagtacggtctcgctttgccagatgacagggatgcatgctgaggaacgtgctggtgggcagtgttgtctttgcgggaacttcctagaatgacttgtacgagcctgggccgtgcagcctcccgcacccttgggccgcatggtttagccggctgctgccaagctgcaaaagtgtgcagtgcgtgactgtgctgaatgcagtagaccaccgtggcgcagtgctaagcatctgcgtgtctgtacgtgtttaaatatggaaaaggtgccataaacatgatgtatgaagggtggaagacggtgcacctgcgtagggtgctcaccgtgaacggagctcgcagggctggcgggtgctctgggcgagctggtgaatgagggtgagtgagtgtgaaggcctaggacatgagtgtgcacaactggagactataaatgccgtaccacttaggctacactcaactattaaaaatactgttcttttcttcaataataaatgaatggctgggcacagtggcctgtgcctataatcctaacatttggggaggctgaagtggggggatcgcttgagcccaggagttcaaaaccagccttggcaacatagcaagaccctgtgtctacaaaatatttaaaacttagccaggcgtggtggcgcctgcttatcgtcccagctactccagaggctgaggcgggagaattacttgagccccaggagttagaggctgcggtgaaaactatgatcgcgccaccgcactctagcctgggtgacagagtgagatcccatctctaataataataagaataaagtttgttgtaactttttgagtttataaactttttaattttatttatttatttgagacagagtcttgttctgtcaccaggctggagtgcagtggcgcgatttcggctcactgcaacctctgcctccctggttcaagcgattctcctccctcagcctcctgagtacctggcattacaggggtgcgccaccacacccagctaatttttttgtacttttagtagagacggggtttcaccatgttggccaggatggtctcaatctcctgacctggtgatcctccctcctcggcctcctaaagtgctgggattacaggcgtgagccaccgcacccagcctattaaaatttgttttgtataacacttagcttaaagcacaagcacatcctacagctatagaaaaatgtttttgtatagcagccttcctgggaagaagaaatagccccgcacccctcgtccttgtgctggcccggggtgtcgcttctgtgcacccttttttcccctctgcccatccttgctgcccctgccggacctcagcaggggaaggggaggtggcgcagagcccgctttctggcgtctgtctgatcccgccgaggtcccgcacagagcccgctgctggcgtctgtctgatcttgctggggtcccgcattctcactgttgcatggactgtggaaatcccagacaggaaggctgtgcacctccccaggaaaaatgagaacatgggcgtcagacagggtccagactcctctaccacagcaggttggccctgggaaatgacttctggcctcagctccccaaggacaaagtggggcccgtgagcaccccttctcaggtgctgagcgatggagagctgataaaacagcacaggcggccttggtttcggggctccctcctcctctccccgacatacctgtagtggccggcacagcctgggcctccgtggaaactggcaggatgggcttgcctggtgtctttgcctgttatgttgctataaaggaatatctgagactgggtggtttctagagaaaaaggagtgtatttggctcacaattctggtggctgctaagttcaaaagtgggcacgtgtgcacctggtgagggtctcaggctgcgtccactcatggcgggagatgaagaggaaccgcccacttgggcagagatcacatggcaggaggccaaaggggtggggtgccaggctccttctaacaaccagctctcatggaaacagagagagacctcactaattccctcaaaggcagtaccaggctgtgggtgaggcctgtgaccccatgacgcagacacctcctccccataggccacacttccaacattggggatcccatttcaatatgagacttgtcagggacgtaccaacagtacccacaccagaacacgtggtcctggggtgagaccctcccggggatccgagcccaccatacccacaccagacagagcgtgtggtccaggagtgagaccctcccacggatacatgcccctcccaggagatgattccccattcttgccatagagaggggccaggaaggcccaggtcctgtgtgtcttgagagtggaggcagctccacctcccagctgccttcacagccctgtgggtgggcagccttcagggcaccaccagcctggggcccagagcccagctgttgctgtggcccctgacgagctgtggcagcaggccccccagctctgagctttggagtctcatgggtggctgggcctctgcctgggtggggtgaggggaaggaattagctgggtctggagccaccatgcttgcttagaaggtgaggaagggccaagccacaaacatggcaggctcagctgacagcagcatccggcctgcagaggggacgtggcccaggtcctgcatgagtcagcccaggggaaagaagcgtgtaactccaagagcctggctgggtgagcctacggaggccgcatggctgagcctgttgcctccgtgaagcatctctctgcgttgcagggaacataggagactcggtgcaggggcagctccacttggggagagcattttcagaaccaccggtgcaggcctggccccgacaagcctcaggatgtgcagctgggctgctgtggagcccctgggctgggcctggcctagggtccagagctgctggggtcctcctgagggaccctagcagtacagaggccagggaaatggcaagagtgcccgtgaggatgccaccttttctgggcacaccagccacgccatcccccagcctcctcagcatctgaggccttgcccgagtgtttgctgaatggaggtggtctttggcggtgtcactgctagtcagcccccgtcgggtggtgggagggactggacccgggccagaactgccttggtgtggatgtcgcttgcctctgccaaccccgggacctggacacatggcttcacctcctcaagccttgtcttcctttatgtgggccaggatcatcgcatctgcccaagggtcgtggtgacagtgaccttggccagtatgtatgcaagtgccaggcacgttggggaccccgtatgcctgccacattgcgctgagtggatccctgccactgtctgccgacatcaggccacgaggatctgcaggtcagtgagtgcatcatggaagctttcatggctcatcagtgagaactgcagggtgattgcgggaggagcaggtcgacctctcgtgtcctaggccctgccctcgcactggcatcatgcacgctcccactgacacatggacacaaatacatgcccacgcatgcacagccacccacatgcatgcatgctgacacacacatgaaaccacacacacacatgcatgctcacacatgcccacccatgcacagccacccacatgcacgggcagccacacacgacacacacgcatggacacatgcacagacagccacatacacacatgcgcgcacacacaggcatccacatgcacgcatgcatgctcacacatgcataggcagccacatgcacgcatgcatgctcacatgtacagccacatgcatgcatgctcacacgcacaggcaaccacacacacatgcacacacacgaacaggcagccacatacatgcatgcacacatgaacaggcagccacatacatgcgtgcacacacatgtacaggcagccacatgcatgctcacatgcacaggcagccacacgcatgcacacacacgtataggcagccacatacacacatgcatgcacacacatgcacaggcagccgcacgcatgcacacacacacataggcagtcacatagacgcatgcatgcacacacatgcacaggcagctgcacccatgcatacagatgcataggcagccacatacatgcatgcatgcacacacatgcacaggcagccacatacatgcatgcacacacgcacaggcagctgcacacatgcacacacatgcacaggcagccacatgcacacaatgctcacacacaggcacaggcagccccatgaacatgcatgctcatgcatgcacagccacccacacggatgaaggctcacacacacatgctcagtctcacgcatgcacacacacgtacaggcagccatatacacacatgcatgcacacacacatgcataggcagccacatacacatgcatgcacacacatgcacaggcagccgcaaccatgcatgcacacacatgcacaggcagccacatacacgcatgcttgcacacacacgcccaggcagccacacacacacgtgcacacacacacacacaggacgccacatacatgcacacatgcacacacacacaggcagccacatacatgcacacatgcacacacacaggcagccacatgcacacatggacacatgcacaggaagccacatacatgcatgtatgcacacacatgcctatgcatgcacagccacccacatgcattcatgctcacacatgcacaggcacccacatgcatgcatgcacacacatgcccatgcacaggcagccacatacacgcatgcatggtcacacacacaggcagccacatacacgcatgcttgcacacatgcacaggcagccacatgcacacacacacgcacaggcagccacatacatgcacacatgcgcccacacgggcagccacatgcatgcacatgtgcacgcacacacagaggcagccacatgcacgcatgcacacacacacacatgcacaggcagccacatacatgcatgtacacgcatgcacagccacccacacacatgcatgctcacacgtacacaggcagccacccatgcgcatgcatgcacacacatgcccacacacaggcagccacatacacacatgcatgcacacatgcccacacatgcacagccacccccacatacacatgctcacacacacatgctcacagttggcctctgtctctcccaggcgtcccatgtggcacctgcttccgtgatctggatccagaggaggcagggaaagcaagtcaggcagcatgggcccagccggagcccccctagcctgagtgagtgtttcaagggctgtgaaggcccatggtatgcaaagcgccatgttagaaaaagagatgtggagtcttcttcctgttctccctgccgctgccatgcggtcactgacagccctgaagccttctcaccaggaacctgcggggcaggactgtgtgagagaagcagcttgcggcaccaccttctggagtccggctgcacaccccaactgtccccagggagctgctggcctgggccaggaagggtgcagggctagggccacagacctgtgctcactcctcacctgctgccccagccctgcagcaggtctctgcctgtctgcacacagtgccatgtgcctggccacagctggcaccagcagagcagggcctgcccagggtcacccagatcacaggcccaggctcaggccttccttcctgccaggctggcccagggtcctgctgacccctgctgtcctggaagtgttgagagcagagaacctgcacacgcccacacgcctgtttgcagacacagtgtggtgtgcgagccccaggtgggccctctcccgcccgtgccaccgtgctctcccactcagccgcccattcttgtcaccgagcccatgcagaggtgtcgactcatgaatcgaggacctgctgtctagctggggcgtgttgacacaggctgagatttgcacaggatttatcactctcagatgaagcatccgctttgctgccaacgggtgtagacatgaccttggtagctgccctgttctttccttctgaagcaggcttgtgaataagtgggcatatctgccagcccaccatctcccgtgcactgatcttgcacagatcaggactcaggactccaggctcttggaggggtacttacccccagaggacaagccccttagacagtgactagccctgtgccattccaggcccagagcttgccgccaggtgcccagaagtgaacctggccctcacagtgctgctgggctgacgagaaggtaaacatgcccacgggtctctgcaggttgctgggatgaggctgccctgatacgcggacgagggctggtgagggcccaggtggggcggtcgtggggtggaggcagtaggacctggtggaggagaggaggcagagctgctgctgggggcatagaatgggaagccaggcgtgtggcccccagggctggggccagagatgccgggcaggggtccctgctggggtgtctgcctgccctgctccattttcctcattcctttcctgaggagtgggcccacccggcctaggggccaggctggagggagagagacaggactggaagggccgagacagggagaggctctgggcgccgggctgccgagccctcggggatctgcctctgctccacggggcagcagtcagagccacggggccaggtgagtgggcaccttggggttgtcatggcaacagctcttagccagaggtggacggaactggggggttgaaggccggacatttgggagcccgtaccctgcagggccactcaggaagcaggagctacagcggcccaccgtgggacagctccacgtgtcacacattcgcctgaaatctgcccttccgaccgcacccctgtggcccacacacccgcagcccagccccctggacttctctcctgtctgagtgcactggcctctgcctggtgctcactgctgtgagtttgagcttcaaagccctcgttaagccctctccatctttctctaggcagagctgggacacagggtttttggggatagaccgagaacaaaggacccgcgagagggacgctgtggtgtgggcagagggcatgtgagaggcagcccttcgtggagctctgggcagggagtggttcctgagaccagttccttgaaagtagtgtctgtgtgtgggggcgtccatgcaggagcccggagccatctctgaggctggagcagcgaggtcctttctcttcccctgtcctgctatgactctaccacagggcctctgctcctgggtccccgccttgggtccagtggtgatgactaagtacttaggttgttggagaagtgtgctcaccattcacatgtatgggttttgaccaacacgggtaacttcatgcacagtgatccccgattctaaagctgagatgaactttgcctattcccggagggcgacgtgaggggtgcgcaccaccacactgtgtccccagagcagctgccccaagctgcagaatgccctctgcccccttgccccacggcctgccccgcctgcgtctgagggcgctgtggcctccctgctgtggctcaggctgcccccagggctctgacctgtgggacagcagacaggaggcctgggctgggggcctcagggcgcaggcgtggtccgctccacacagtcttcccatgtgggaccaggggttctcctccgcccactcagacaactcccctgctgcccagcccctctcgggctgtctcaccaggccactctcggtcgtctcttagacctggtgacattttggaacagaaataaagttcggcagtgattgggctgagaggcaggaagatgcaatgggagtttgggctgagggaaggtcagcaggacggcctcagggcctccatgtggtggggaatcccggctaggcccctgacccaacgttgctcctcaagagcattgaggcctggaactcagccagaggcgctgaggctgcaggagtccagggctcacctcaggcttcccaagccagaggcaggggagctggtggctgcccggacatgtgggtcggtggctaggggtgcactggtggatggccagagatccatgggtgggtggccaggggcatgctcttgggcgcccaggtgtgagggtgggtggccacgtctcttcagccagggcagctgcgagcagggctgtgccaccaaacaccgtgcatgcctcggctgcgtccctcctggccactggccctgccccaagtggagactggcccagccgccaactctggcttgcggtcccagtgctgcctcctgttggccacatgctctctcgaatgagctgctcgctctggcgtggttgtgaggatggagcggtcagatgctggggagtccccagctggctctgcactgtgcagcgcggggcctgcggttcctcctccaggcttccttcagctgcacgcgattcccctggcccgggtatccaggaggctccctggcctgaccgtgtgtcagggtctgcaggtcagagtcagcttcgctcgaggctcctgctccggtcgagtcctggaactcggagctgggagttggcatctggtttgaagctgtctgggtaatagagacacatggtgccttccttttaatacggcctggggcacacagactgccctctgagcctggacctgcaccctctgcctcggcctccgtgaaatcaggctttggaccccgcgaccccagccacggtaccctctttgccgccctggacagggcagaagtgttttgtgtggattgtgcctgaggaggttggagacatgagaggtcagggagttgtccgtcccctggtgctgaagctgaagtcagcgagggtctccgggacactggagcttggccttcaggcagcagccagtggggagctgggctgattcccatggaaatgggcatcctgcgggcatgggcagccctccccatgactcatggccccaggcattcagaagagactgctgcctctggaaagggagctcatccccggggccgtttgtgagtcacagtttggtgttaaggagctcctacataccaggggtcatttgtgaattaggattcgggtgttaaggagctcatggtgggggaaggggtggacatttgtgattcacagtttggtagtttgggttcctggggccgtttgtggcacaaggtttgttgttaaggaactggttcctggagtcgtttgtgacacgaggtttggtgataaggagctggttcctggaattgtttgtgacaccaggtttgctgttaaagagctggttcctggggccatttgtggcacgaggtttggtaataaggagctggttcctggagtcgtttgtgacaccaggtttggtgttaaagagctggttcctggggccgtttgtggcacgaggtttggtgataaggagctggttcctggagtcgtttgtgacaccaggtttggtgttaaagagctggttcctggggccgtttgtggtgcagggtttggtgtttctcaagacttcagttctctacatttctaaaggagcaaaactgccagtgccttctcacctcagcaccgacccaggatcagagtcacggccgccctggtgatggagggcaggcctgggtgtggaccccagcggtgggaaggggggcgaggggccatgcagcgggcctgtggcagggcagtggctggagcccatgtcatgcccacccagcagccttcttgctccctgtgcaggtgtgtggcatcctcagaggtgctcacgctccaggcctggctgaggaaaggaggtgagcaggaccctgtggccacgggtgttgctgataggaagtagttaactgacaaggccaccccagcagtccctgggagactccagccagagcaacgtcaaacacggcccgcgcgcccctcaccccttccctccctccctgacaggcaggcaaggccattcacagtctcttctgaagccttcccatctcccgctggagcaatgaggtctacacagacagcttaatttgaatttgcctctctgggtcccctgaattgagagtggagttgctttcaacgcatgctgacttcacgtcccatcttgttgcttcagctgtggttcaggatgtccaagcactatgttcgcgtgtgctaacatctcccaggtgccctctgcccggcacactcgcctcccgaggcaccccggggtgtgggcatccagcccagggtggggtacttgcagtaaggtgagctttgccctcccaaggctgcccctcctcatctcgtgccctggccccagccacagaccttcctggtggatgtgcatggtgaacggtgtctgcccaccgccaggttcaagcaggcggaggctcagagtgattctcggtcccttagagagggtgtgggggaggtcgccagctgtggggcccaaggacacgggcaagcctgtggctcagatcacccttctaccgtggcaccagccacacaggactgctgaccaaaatcacagcgttcctcatatccgcatagagaattcctcatggcttaatgaagtatgtaggagaagatgccagtggctcatcacccgtcacctggagtgagggggcaccatgggcctcgggtcgtgtctgctgccttcccaccacctctgcctccccacatcttcatgtctgtttcctggtgaagtcgggtctgtgacagatcgttttgtttcctgctctgtcccttcgacactatatcgtgagcattttacgctcaattaaatatttcctcgatgatggtgtttaatggttgcataatgtgctatttcgcagttgtgccataatttacttaaaatatttccttgttgtaggacatttagccagctcctctttttatttactcacctgttgatttatctttcgctgtgtaacaaagcatctcagcaatcatctgtccacacagatctttctctggctacttctttagattagggtccttgtagattgattattagtttggataaaattaattaattggataaattattaacccatttatgctggaggttgcaaatttttttgtgaaaaatcagaccttggcgatgaccttgaacaccaggatataaataactcccacaagcttagtgttccaataatggaacactaggcataaatgggttaattcaaatgcgtgaccatttaaacccatatttgagttgttttgcatctatttcagccatgtaagacttccgggaatgagacttggctcatctcgtgtaattctgagactgcagagctgggaggactttgtcatggctcataatcttaatgaaaccccaggtatgtaatggagcagttcctgtctccatcttatgaagatcagcacaccggggccctggttcacctaaggttctgcagatggacagggtctgagcaaagaaccaggcatcctgcctagagagccctctgtcagctcagctctgcagcccagacttcccctccaggctccaggctccactcctaagctgaaccatggggctgcagtggcctgggcagggagcagcggggaagatggggctgttcccagctcaccgtctctcagttccatctcttttctggatcccaggctccccatcagcagtgagatccctgcctccacagggtcctgtgagtgactgggacgccctacagcttgcctgccctcaggggccgggtgctttctgctgaccacaccgtacttcctcttgctttggaaatggcagtgaagattgtatgtgagcatccttctggggtttggtgtggggcccctgagatgggacgcacgcaggttcaagaactacactgtttgccaaattgagggcccactgtgactgcaggaagtcagtttgtagtgagcggggaaaggccaggaggctcaaggaggggaggactttggggcagcctggccatggccctttgtcatcactgtgtcgagtggcctcccttccttctgaggctccagctttcctcaagtttgggctctgcagggaggtcctagcagctccccagctcctctaaccaggacagcctcagtttctgggggccctgcagagacatcatgacctggtgcagggcttcccaaagctgtctgtggccccatctgcccagcctgggtcaccacaggtaggatccaggaacccgggtgttggcaggctcccaggaaacatggatgtcatcagcccaggtttgaggggtgctgattaggaacactgtgaggatacggaaggtgtgtccggttctcacctgtcactcctgtaggagttgtggcgagtcctagttggcctattccagcaactcttgtttaaaggaatatcctttcctgattgaattaccttggtacttttgttgaaaatcagtttgccggccaggcgaagtggctcacacctgtaatcccagcactttgggaggtcgaggtgggcggatcaccaggtcaggagattgagaccatcctggctaacagagtgaaatcccgtctctgctaaaaatacgaaaaattagccaggtgtggtggcaggtgcctgtagtcccagctactggggagtctgaggcaggagaatggcgtgaacccgggaggaggagcttgcagtgagccgagatcgcgccactgcactccagcttgggcgacagagtgagactccgtctcaaaagaaaatcagtttgccatatgtgtggttctgtttctgaactctgtgttccattcaggtgaccttgtgctgctatcctgaatactgcagctttatagtaagtctcaaagtcaagtaacataagtcctccaattttgttctttttcaaaattatagctattctagatccacataaattttggaatccgcctgtcaatttctagaaaaaagcctgctgggactttgatttggattacattcaatctgtagatcaatttgggaagaactgacattctttttttttttttttggagatgaagtctcactcttgtcactcaggctggagtgccatggagtgatctcggctcactgcaacctctgcctgccaggttcaagcgattctcctgcctcagcctcctgagtagctaggattacaggcgcctgccaccacacccggctaagtttttatttttagtagagatggggttttaccatgttgaccaggctggtctcgaactcctgacttcaggcaatccacctgcctgtaatacaggcatgagccactgcacccggccgggaagaactgacattctaacaatattgtgttccaatccatgaaaatggtatatttctgtatttatataggtctttaccttctcccagcaatgttttttattttccaacatgcaggttatgtgtatttttaaaatacttagctttaactagttcatgttttcatgcttttgtaaatgtgctttaaaatttttattttccaatgtttcattcctaatatatagaaataattgacttttatatattggtctcgtattctgtaaccttgctgaatttacttattagttctagaaagtttttgtagtttcttcaggattttcaacatagacaattgtatcgtgtgcataaagttagagttttatgtcttccttttcaacttttatgccttatatttccttatcttgcccttcagtactggctaggaatttcagtacagtgctgaataagaatggggggggggacatttttaccttgtttctgatgctagcgagaaagcatccagtattttgacattagtatgctgttaaatatgagtttttcatagataccatttatcaggctgagaaagttcccttctgttctacttgctaagagtcgaattttgtcagtttttttttttacatctattgagatgttcatatgaacttaattattctgttgatattgtaagtaatactggttgattttttttaatgttaaacctaacttgcattcctaggataaaccgcactgggtccctttttatacaattgatagattcaatttcctaatttttagtgagaatttttgcatctatgatcttgtgcaatattcatctgtggtttagtttttcttgtaatgtgtttgtttgccttggtatcaggatgatgctagcctcaaaaatgaattgggaagggttccctcctcctcttttttctggaagaatttgtgtgagatatttcttccctaaatatctgatagaattcactagtgaggtcatctgggcttggcattttctctgtgggaagctttttaaattatgaatttaatttaatagatatagaactactcagatgttttttgagtcagttttggtcatttgtatcttcttgagtttttgcttattttgtgtatactgtcaaatttattggcataaaatcattcataataattcattattatccttgtattacccatagcatctgtagtgccatcccttcttccatttctgattttggcaatacatatcatctcttttttcgtcatcactctaagttttatcgatttttttatctctctcctttcagatctgtcaggttttgcttcctatatttttaatccctattttggggtacatacgcagttaagattgttatatcttcttgatcacttgcaattgtaattataattatgcaatgtctgtcttcatctcttaaatattcttgttctgaagtctgacttgagtaatattaatatagccactcctgctttcttacaattttaatatttatgtatacctatctatatttctaatcttttaatctacctgtgtctgtatatttttaatggattttttgaagataacatctaattgaatcttgctttttttattcagactgataatctatgccatttatatttaatataatttttatgacattgagtttaaatctgccatcttgtcatttgttttctttttgactcgtatattctttttttcatttttcttgcctcttttgggctgttttttggtattccatgttttctccaacattggcttattaattatacctctttggttttcttctgttttcgtttagttattgctctagggcaagggtcagtaaacctttcctgtaaagaaacaggtatcaaatattttaggctttgggagccatactgtctgtgtcacacctctgctgttgtagcacagaaggaactgttacataatgagctcaaatgtgtgccagtaaaactttattacaaaagcgggcggtgggccagaattggcccatgggttggagtttgatgaccccagctctatgtcagtctgttttcaaataatcttactagttaacatagagcattttaaaagtatttttccattttttctttttatgtaatttttacacaaaatttttttgtgaaattattttttcactttagagagtacattatcttctaaattaaaatgattcaaaaatgcttgttgaagtgtattcacctatttaaatacgtgaactgtattcacatatttactgcttctggcagtagtgttccttcctttgtgttgatccagatttccatctggcttttctttttcttttgcaggaagcacttccttaacatttcttatattgctgtcctgccactaacaaattttctcggcttttctttgtcccaaaatgtctttatttcgtcttcatctttaaaggatattttcgctggatatagaattctgtgttgacagtcattttttttaggcatcttaagaatgtttgttttgttgttttctggcttgcatgggttctgacaagaagtctgctagtagtcttatctttgtactttgtatataatatacaccccacccccagctgattttctttttatttatcctgcttatggttcattgagctcctcggatttatggatttatagttagtcagatttgggaaattttggccattatttcttgaagtattttttctgtccccctcccctttttccagtactccagttttacatattttaagtcactaatattatcctaattactgaagctttgaactttttgttttttggttctcaatgttttttctgtgctttaatttggatagtttctgttcctgtctttaagttcactgaccttttatcctggagtatcctacctgcccttgatttcatgcagtggagttttannnnnnnnnnnnnnnnnnnnttgtttttcatgtctaaaagtctatttggttattgttttcatatctttgttttctccttcattttagtagtctgttgctacgtaacaactttctccataagttagcacctaaaacagcaggcatttgttgtctcgtgaagtttttgaaattcaggaacccagagcagtttagctggatggttttggcccagattctcgtcagagggtgcagttaggggcttttgtcctgggttgcaaagctgaaggcttgacaggggccagatgatctgcccaaattcatttaggtggcccatggcaggagacttcacttcctctccgtatggacctctccataggtctgcttgagtgtcctcacaacatggcagcattcaacgcagagtgagtgttgaatgagttagaaagagacagacagagccagcccaagatggaagctacagtgtattttataacataatcttggagttgatgtactatcacagctgccctttttttttttttttttttttttgagacagagtcttgctctgtcacccaggctggagtgcagcagcactgttatagctcactgcaaccttgaactcctgggctcaagtgatcctcccgtctcagcctcctgagtagctgggactaccggtgcacaccaccatgcctggctccgccattttcaattgatcatgtaggccaaccttggtatgatgtgggaggagacagcaccagggtgtgactgccaggaagcagggtcgctcagggccatcctgggggctagcagccatccccttcactgtgttcaggttttcctgtaaattctgcagcatatttataattgctgttttaaagtccttgtctgctgatttcatcatttctggacttacttctattggctgagttttctcctagctatagaccacattttcctttttttgcatgcttagtaatttttgattgtatgatggtaattgttaattttatgttaagtgtatgaaagtgtgcaaatttccttgttctttctttgagagtattgggctttttctggcaagcagttaagttattttggggtcagcttgatcctttcaagaactgttttcacactctgttggggcttgtatggatttgcttttattccagggctagtttaactctgctactaagacatgacccttctgaggttcctagcagttgccctgggtgctcagcaagaacacctgctctggctggtcggcacgtgcctgtccccggtcctgcgtgacctctggagttgttccctggcagctccccgatgtgcttggttcagccttgtggagttgcatgctgtgtgcgtagagtgtattactcagcaactcagcgagacctttctccaggttgccagaagccttctgtgcacagctccgccctccacagatcctcccttcctctcagcaggaccatcatgctgagcttgagctgtaccccacagcgccaagcctggaagagaccattgggcagagcaaggggtgttcagaggttcacttcatttgtttctctgtcttcagagatcgcagcccagtgtctgtgaacagttactgtgtgtattttgttcatttttctagttgtttacaacatgctggtctcagttgcccagcatgacgtcccagatccacatgtgaggaggagcagcagcacgggggttccactgcgagctcagggcaggggtctgtatgccaggaacttgggtgggcttcatagacccctgtcattcccagaattatacaggcagcacggagtgtgcttgtgcacactttcctgggtggagaggcacacggcacctcacgcattgaagcgttgtggcccctcggggagttaagacccagtgggaggaggaccagggcggggggcctggagatggaaccgcaccttcccatgctgcctcgctaattctacaaatactgttgacatcctgtgcgtgtggccttgagcagaggggtaaagaccgggcagccctggcaggggctctggggccaaggacatcaccttctgggggtaggagcgagatgtccttccagagcctaggttttgagaggaggtcaccctggcctggttaggatgagttgtcatcttttagcttttggtttggtttctgtttgtgtttattttcactttttgccatggaaagttttaagcatatatataaaaatatggaaaacagcatcgagaagtccctgtgagcccatcccaccctcttcccccttcctggattattctgaagcaaatccaaggtatcgtaattaatttagctgcaatcattcaagtattgtagcatgtgtctctgaagggctggtgactccataaagccctaaccagagtccttttattgtggtaggacctggtctcggtgggtgaggacggtggggaaaggggcagcgtccggcagggtgaccacctgtgcgaaggagaagagagacaaagcacctggtgttggaccagacggggggctcgggaccttgggctgcagttgaccacgtgaggcccttagcctccagagaaggagctggtttaacatgaccaatggttgtggagaccttgcttcctaggtggggctgccatgccgctaccatcctcccgcataagtacgttacagagatctatggagccaaggggctagttcaccaaaataagacctggccgtgtccaccactctgctggtctggctggggctgccgtcacagagccccacggcggggggctgagaccgcaaacgtgtgtctcacacaattctggaggctgaaatctgagatcaaagggcaccggagttggcccctggggaggactctcctcccggcttgtggacggccgccccttgtattcctgtgtgacctttccactgtgcacttggagagctctggtgcccctgctggatcaggacccacccttatgaccttcatcagacttaacttccctccttaaaggtcctatttccaaatacagtcacatggggattaggttagtatctaaatttgggggacacagttcagcctgtaacagttgctctgcacagccccgctcggttacatcatagatgttcgcacacgtctgtgcacgtgaactacctgttatctgttgcacatgcagcgttactaaacagggttcccttatacctcccggggttcctggagtggcgtcttctcttttgctgggaaccttgccgcctttcctctccctgcccctcccagcccgtgtgggccacctgctgtgttccacgccttcctttctcctctgcttgtgcagcggaaggttctgccagcaggggagttagtgagcagccagtggagggtgtgcccagccttcctgctgcagacccgcccccaagtcaacacggacttccctccctgcgtgccagaacttcgcgttgttcttagtggcatctggggtcgaggagggcgactgtcagccagttgggggatgttttcttcttggtctctcggcttctgcttccctgtgagctgggcagcctcagcccaggtcctatccggtactcagctggcctcggtgtgcacagcgcaggcttgagtgcagccgtgggggcgggcagggcagcagcagggcccctgggaacagctgagtctgaagggtcagaagccatggcccctgtggggggctctggggcagccaggggagctgctcgttagtcgtctctggggcagaaggaagggaccttcacctggattgggactgggcctgggtccccagtctcacagggagcttgtcctgattgtacctgcccagcctgccctgcagaggggaaggaggcccttggctcggagtatgcctgccccggagctcccaggcccagccggggcccggggtgggggccactcactgggcacaggtgcagggtgcctatggccaggcctggggtgtggccggtctccatgctgcagagccggaggcctctgtgttctctccctgccctcccctcctccctatacctgcccctcctctctaccatcctacccaacctctctctcctggagccctccagccccacccctccccgtgtacactaagtgcccaggcgggagggcctgtgggtcctgctgagccacacaaggccccaatcgagcaggtagcaggtggtgtgctgcgagctgcttttccctcctgggtcaattcctaagcccaccaggcgatcgatgaagagccacctgcctctgggtaatgctgataggtgagagccactcaacagcgcttttatttttttttttaaggaagccgcactcagccacaagctgtgcggaaagctataggattatcaagatcaaaaggtcagccctccgcctcctctcctccaccagagcctcaccctggccacggcgggtgctaccctcgatgtcacggcctggccaccgtcttacccccgtcccggtgctgctgcaacgtctcctcctgagacgcttccctgaccatcccaagccacggtcaccccctctgtcctctgcactgtggcccagcctggccgtgcgatgacacggttgtctgccagtgtgtgtcacctccccaaagctgatgcgctggtgggggaccccgggtctcaccagccgtgcaccgagacggcctcgctgcactgacctctggcgccagccactgtctgctgggcagcctgaccttcgttttccatccccactccggtgcagatggagagcctggaacaccgtcccgggatccccggtggccaggcagaagcaccgaccctagcatggggtgctcagagaggcccgcctgtcctcagcctgggcctgtgtgtgttccacgcctccccaccggaactgaccctggcgtggggtgctccaagaggccctctggcctcagcctgggcctgtgtgctccacgcttcctccctggtgccgacttgatgggctcagcatccattctcgttcagccacggggagcagtttcagggccaggagtccctcagcatctggaggcaggataagccctgcctgctccccaaacacacgtctccccactgggcttcagggccagcttgggcttcggtgggggtgtccatcaggggtgagctgcggcccttgtcagggcacatcctgcacccggggtgcccactcccccatggtggtcgggggttacagtgagggaggcagcagtgggcagctggtgtgtcccctgccaggatctcccactacccctccatccaccgcagagccccctgcccagccccagaagagccccttggcccccatccgtagagagcccaggtgctttgcccgtacccctcagcactgtccagccccggccgtgccgtgctcctactagctctccaccagggctccccacctgcccctccccaccgcccctcgcatcctccaggactcagcccaaatgccaccttccttgaggcctccccaacctcctcccagagccctgcccctgctcccaccctctcgctgtaattacaaccccatttagggctggcgctctctagcccattgaggccccaggacaggacccggactcgcgccccagcccgtgaggtccagaggggactccccagccggggatggggcctgtgagccaggctccctgcacacatttacggtgggggtcaaggccccccttatgaaaagggacactgaggcaggagaggctgcaccagaattggaaccgggcccaccagccccacggggggctcctccccgctcctccacggctcggcatgcagcccttccctgtgtgactcgttgcgtcattgctgggctgggccctttcttctctccgtttctcacctggggataaagtccccaaagtgggatttctggattaaagatcacggccatctctctctccgtgacagtttccggctttctctccttctgacgcgccccccaccctgggtgtttgaattgactggaagcgttgacgttttattgacgtccatcgcggtgtcctctccaaacagaacgatcctcactgtggagttcgatctcagcacacagaaggctcggagctggcttttcattcctgtgtttattcgttcagcaagcgtttctccatatcacccgtgtctggccctgtgctgggggcagatgagagaggcacggtccagtgcccaggagtccgcagccaggaggacagccctggagacctgcccgtgtgagtgtgagccggcgggagcagagagcggcctctgccctgggctgcgtcctggaggtgattttcagcctggatcctgttctggaaagaaaggcctctcgttcagctgagcccagttcggtgtcgcaggcgactgttggatgccagacatgggctagacatgaacaggaggagctgcctgccctgaggctcagggcctgggagcagagacagacggggaagccgcagcgcagagggtgagggctcacccaggagcaggtgctgtggggaggcctggtgcacctggaccaggggcctcacttcctggggctcagggccatcggccaggccgctgggcatgacctgtcatctgggaaacggtgcggcagccccagtgtggccccgatcctctctatagagtgtttgagtcccaggcctgcagcaccccgtggggctcacagtgtgcatgtctgaccctgcaggcagccctgcggggtaggtgtcagcctctctgtcgcgggacaggggacagagggagcgcagatggcctgcagggtgtggaggaggctccccaaggcctggggcctggactgggctgtttgggcctgtatctgtcagcaggagctgccgcctgggagtcatgctggaacacagcagagcctggagatgagaggtcttcatcctgtctctccctccctctgctttctctgtcctgtgggctctgagccaccgtagttctgccccctctcttctcatctcctccacccccaagtgtggggaccctagaccctgtcccctccatgtcccctccacatctcctctggggctccgagctgctggccctccggggaagcctgcaccgccatcacaggtgcaggagttcagagtggcaggcgtatgttgggttcagcgtggcaggcgtatgttgggttcagcgtggcaggtgtatgttggcttcagcgtggcaggtgttatgttgggttcagcgtggcaggcgtatgttgggttcagcatggcaggcgtatgttgggttcagtgtggcaggcgtatggtgggttcggcgtggcaggtgttacggtgggttcggcgtggcaggcgtatgttgggttcagcgtggcaggcatatgttgggttcggcgtggcaggtgttatggtcagttcagcgtggcaggcgtaggttgggttcagcgtggcaggcatatgttgggttcagcgtggcaggtgttacggtgggttcagcttggcaggcgtatgttgggttcagcgtggcaggtgttacggtgggttcagcgtggcagacatatgttgggttcagcgtggcaggtgttacggtgggttcagcgtggcaggcgtatgttgggttcagtgtggcaggtgttacaatgggttcagcgtggcaggcttatgttgggttcagcgtggcaggcatatgttgggttcagcgtggcaggtgttacggtgggttcagcatggcaggcgtatgttgggttcagcgcggcaggtgttatggtcggttcagcgtggcaggcgtatgttgggttcagtgtggcaggtgttacggtgggttcagcgtggcaggtgtatgttgggttcagcgtggcaggtgttacggtaggttcaacgtggcaggcgtatgttaggttcagcgtggcaggtgttacggttggttcggcatggcaggcgtatgttgggttcagcgtggcaggtgttacggtgggttcagcatggcaggcgtatgttgggttcagcgtggcaggtgttacggtaggttcatcgtggcaggcgtatgttaggttcagcgtggcaggtgttatggtcggttcagcgtggcaggcatatgttgggttcagcgtggcaggtgttatggtcggttcagtgtggcaggcatatgttgggttcagcatggcaggcatatgttgggcaccaactaggccggatgtgacacatcgtgagctgccacctgcacagccttcctgccgacagttctgggcagcggctcgcatctggggtcagtcactctccctgtctcggttcaaggtcaggcttgttctgccgtgtctgggcctcccacacctcacctaccaatgtggactccgggttggcacggcaggggcaggggaggcacgggcgaggcaccccttggcttatgaagtgctccagccagccgcctgttggaccccgttgcttcctgggctcacagcctgccttgtgggacgagcctgggtcctccgtcagcagctggacctgaacctgcctgccccacggaggcacttgcgggagcccagtctaggtgtggtgtggcatcacctcctgcagggacagtcgtgatgtgttccatggagcccacgcacgtgatctccatgaggctgtggtcctcggccccctcaacccgtgctagtgtgacagtgctgattgacaatcgtagctcattaccgacgcaggctaattaaattacccttcggcagctggagatggatggcacagccaggctggaacatggttatgttccgttttgtcacgtttttcagtgttttttcccgggtccctgtgatactgaggttggagagaaggggaggcagcaaaggcgccgggaagagggccctggggaggtcacctgctcccagctgcacgtgggctgagctcttgcaggccatccctgtgcccaaccctgggctggggatttaaggaaacctggggagtttaggaacctggacttggttcttgcccttgagagcctataaggtggagttcagggagagctaagagcctgcgccgaggtagatgctgggaactcagagaggcctctgggagaggctgtgggagggggtcccaggcaaggggtgctctccacgtgggctgactgctccttccctggcgttcccccgggcctctgtggcccccacagcagcgtgtgtgccttctccttgagacccaaccccgccccatgccggcagccatgggggcgggcgatggtgcctgggcatggatcgttgctcggatgttcccgtcccgggcctcaccgtccacgtgtggcctggaccagttgcgtcggtgccattcgggccccaccccagcctgccgagccagagcctgcctttcacagagccttgggggagtcctacacacgcgagggtttgggctgtgccgggctagctttctgcctggcgcggtgaggcggcgcttccgtgctcagcttcgtccgtgtggggaagaggccaggttctccatgcagagggttggtgtgccagggcttgcaccgctgggcccctgtgtggggaggtcacaccttcagctccttagctgacatgctggtcttctgggcgttcccctggtggtcgtcactgcgtcctgttggccccttggtgctgagccgcatccccaactgtgagaactctcgcctctggttaaggctgtgaacacgcagtgcgtgtcactcctacccggcatgggctgtgctgacttccaggcaggccgcaagggtatcgcatgacgcgctggagaaatccaagcctaatcccaggaccccaggatgatgctccatccctggagggacctccaggagctcccttccccaccccctgctgagcctgtactttctttgtgtaaattatccgtggggtggggtgggtgggaggcctcgctggggaggacagacatggagggccccactccagcagcacgcagcccgggaggcgcggcctgcgtgggagcagcccgggaagcgtggtgtgtgctgggcggcagcagccatggaagtccacgctgcctccacagtacccaggagctggggaggcagtgacttgaaatctcagagccaattccttaaaaatccagaaagttctaactgatttcggttatcagcaggtggggcttggctccctgttctgcctcaaggttatcttggccaaattgtccaccccaggggccactgtggggtcaggagtgctggtgtctggggggccacagtgcacctcgctgggctgaatggcagggtgcaggagggcccactctgagcgggcacggcagggacagtgcttacagaggtcagtaggggaattactgctggcgtctgctcagcgccatgtggggcagggcagggcactggccacacagaggacagatgtggagggcccctcagagacggttgtcgccccgtattagggaagacgggagaagcgagcacagacactgctctaattatgtggctctcatctgggcagggactgcctccgatgcatcgccatttatttttaataagtcgttggaacaacttcagctccaattattgtcccagagctgatggcaggggccagtgctcagcccgtccagtccctccaatgagggactgtgtcacctccctgtgccacccctcccatcccctacagccaccctgcaggagctctgccccggaggccaggaagcgtggcccttctccctgcctgcaggaggcctcaggcgcaggttcctggaatggaaattgggcccgagccaccggtagaatctggcagagtgctgctgagatgtgcagaagcctccgcgccccatggcccacctcgctcctactcactgcacacctgcagtgggatgcatggcccgctttgcactctgcagaagattgggcgagcagaagggccagatctgtcccaattcctgcggcccccagaggaagctgctgccaccgcctcatccagacctggagctcaggctgcagtgccgccttccatgctggacctgcttctctcctctacatcttccggggggggtcctgcggaggcagccagcacctcttccttgtcccacacttccttgtcccggcattcccctcctccattagccccgaaggcctctggagcttgggctgggcatgagcttcatgtgtgtccctggcatgtggtcagtgatgccaggggaggcctacggtgcccatgtctgtggcactgaccgtgccatccatctcaccagcttctgcctgcctctgtctcccacttcgccccagcttggccctagatctccaagtactgcagccgacctcagcccctcacccactgggccagcaggtgctgctgtggtgacccactctgcggtcaggagcccagcgggccctgtagtgagtgctgcccactacctcccctacctccgagctgcacctccccatccctactgcaggaggaccgctgtgggcatggagagcaggccagcacagtgagacgcctgcaggagcctggcccagccagcgctggcagctgagctgcccatctctcctccttggccctcaccgggccctatgtcgctgcctcctgctgcttccccagtcatggtacaccctcactgaaggccctcagggctcccgtcagcccgtggaacagatctagttggttttcacgatgttccctgcccttcacccctgcctgcccccaacgctcccgccaagcaggactgctctggggctggccggcaagaggtgccatggcctctgcgttgcctgcctgtccgcagcctcccgtggcgtctcacaccagcagcttctctgtagcgctccctgagcctcctcttccccacttaagacctctcctcagcacagtgcaccctcgtgtctctgccccagagactggaaccgtctggagggtggagctcgctctcatctcttgcttcagccctttgttcctgggagcatgttacggcctcagcctgcagtgggggcacagggagctttacagaaccagttagggttccaggagcaggctctgcaaggctccacccttgtcttggagggcagaggctgtcgggacccacagcgcaagggcctaggcgtctatctcctcccacctgggcacctggctcccagagcgcacccgggctctgcaccaccaacctgggcacctggcttccagcatgtactgaggccctatactcccaacccaggcacctggctcccagtgtgcacccgggcgttctggcccccctcccaccaaccagccctgctgagcatctgtgctcccacccacggtctgtcagggggcactcgtggtctctgacatggacatccctggctatcccaagagttttgcttcaaaaccagcatggttctccagacccaggaccaccccaccctcccctggggcgcatcacggctgtctgcctggcccattgcgggccgatggtgcctgtcacgctggcaggcttgtccagggcttccccgagggcccagtggctcactagaggctgtcatctggctcgtggagccccgaagcccccaggcggtgcacagggcctgcaagcaggaggggctgccattcgagagagagagcagtcgctgtagatcccgtagcagccgctctctgggtctgtgcctttgcgtctccaaggcagccagtcctgattaactgtgcaaacttaattagttcacatcaaagtttgtggaaggcattcctcaagggatcttgtgtgaacagcctctggttaccaagaggcctcaattccacactgaggtgatggtattaatattgagtatcccttctcaggtctccagtcctccctgcatcgtaaaaagactcatcttcccatctggctgctccgtcgccctgcgcttgtaaataatattaaagcaatttcttctgaggagactgaagggaagcttgcagggcagggtgtcctgagacctctgaaagctctgctgtgggcactcagggctacagccgggcagcagcagggctgggatgccccggggctggcaccaggcctgggggccccatctgtgcccggcaaggtcagctttgactcaagggacaggcagacaggccttgcagacccccaagagcttctctctggcccttctttccccaaggaggagccactgtggagagctggggtcttggtgggaagccttgggcccctgactctgtgggccagatcccatagggtgggtgcttgtgcacgcctcacgcatgtgcccccttccgggagtcccagacaggatgggcctggtcacctgctctggacagggcagactggggacagggatgctcccggaaggatgtcactagacaagtgagagcgtggtcagtgggcgtgaggtggggacttgagctgcgggcgtggtaggtgtctcagtgcttcagtgtggctatactagagctcctgagactgcgtggtttatgaggaggcttattcgacacaggattctgctggctgcagagttcaaaattggacatttgcatctggcaaggtcctcaggccgcatccactcctggcagaagtcgaggggagctgttgtgtgcagagagtacgcagcgagaaaggggcggagtgggggcggggggcaccaggctctcccaacagtgggaaccccctcaccccagggagggggccagtctgttcacgagggcccaccctcacggccaaacacctccggttaggccccactccagtatcgaggatcaggggtccacgtgaggtcgggagacagacgtccaggccacagccccgcatgggggaagggcaccgctgcagcagttctgggcatcagctcgtgtggatgtctaaggaatatttcctcgtcctgacaaattgcccagcaactgtgtcatggggactttgcaaatccaccctttaaagactcccggcaggggggtgttcagaagccagaagcaatttggataatgacccatccagccctgagccccagtcaaaaggaagggctggacctttgatctgcaggttccctggagctctggccaaaggcaagttcccccgagtcccgtccaggaaaggggccccgggtctgccctgcagggagccagtgctgagctgagacaggccatgagccctgcagccgcctcccctcctccttcaggtgttcaggtgtctctgctagcaacacaagtggccaggaaagcggctccccaactgtctgaccctcctggagaccctggcccggggtctttgttcctctgcaagtcccaccgggctgcgggaattcctccgcagggccgccccgtccccatcctggccagtttctccctcggctttcctcggggcccaggctggagtgcagtggcgcgatctcggctcactgcaacctctgctcctccagagtagttttaagcagttctctgcctcagcctccagagtagctgggattacaggtgcgtgccaccatgcctggctaattttttgtatttttagtagagacggggtttcaccatcttggccaggctggtcttgaactcctgaccttgtgatccacctggctcggcctgccagagtgctgggattacaggcaggagccaccgcgcctggccttcctcggggctttctatccttgggcccccgggtgcctgacggggctgcaggagcacgggagcccacggtgttccgggactgcaggccggccaccctccacccaggagctccagggagcggaggggcaagatggggcagggcagggcagctgagaacacaggctgagcccagcgcgtggggtgtgggcaggtgacggtctctgcaagcccaagtctcctcctgggtctgggggtgagatgtggctgaagtgctgctcaggggtcagcctcagtactggctcccgggccttcagccaggccgtgctgtgcgggggcttgttccagaccctccccaggactgaaatgctgtctcatctttctcctcacagaggccctcagtggaccgcgaggtctccccgcccaggccttgtgacggccgtgccgctggccccgggcctgccggtagctgcctttctgcagccagactgttaacaggctctctgcggaccctcaccagtgcctaactagatcctggccccaggccttcctccctgccctctcgggcctgatgagccgcacccggcattcaccccgccctgggctccgctaaccccgtcttcggaggccgaaggagtgaggtcttcagcccgtgctgaggcggcctcctcgtgcgctcagatctggacgccacctggcttgcggggcttggggctccctcctctggttggggggttggatggagggtgcggagtgcagcgtcccctcccagcctccaggcctgtgcaagacggccccacaatcagcaaccaggcagtgaggaggaggctctgggtctccccaacacatgtgggacttgtctgatcccctgaagacacggactcagtctagtgcccatgggaccctgacatctgaccctgcgggcccctttctacggccggcaagtagctgtgggcccagagcccacctcagaccagtagatgagggtttcggtgaattgttttgtctcttttgagtttgttttcatcgtcactctatttatagcaagcactgttttttttcattttacagcagtgatgtaaagcttcctttttcactgggcctattgaagctaataaggaaagttgggttaaagaaaatactaagtaaataacaggcctgtaggcagaccgttacctagatggcagccacttgctggaccggccagggccgatgccctcagcctccagcaatgccccctgagtggatctgatgaactttattgtacagaggattctgacactgtgaaaggttgagagactcacacagcttgggaggggcaaggcagggagggagggatccaggtcggccctgctgcagtctcgggactctccggcacaaatcctcaagcccctgcctctggggtccccaccagacttcatgcacaggacagggacatgaggagggaaggcctctgtggagctttgccgtcttctagggcacagttcaaactgtggctgcttctgcctcccaggggacccgtggcaacatctggagatatttcagtcctcacagctggggccaggctgttggcctctggtgggcagaggcccggggtgctgctcggtgtgctgaggagaccaacccggagtaacctggctcccgaagtccagagcaccgaggctgcggggtgccgctcttggggacgccccagacacccctgagcagctccccgagtttctctgtggaggaaatgggtgggggtgtccagccatggctgatgccagaggctctgcaggtctaggaggccttcaagagactcacttctctagtcactctgcgtcccctgcatggcggtggggctctgaggctgagggcacaccccagccctctacgttcccagcagctcctgggctggggggccaggagtccctccaaccagggggcaggcggagcagtgtccctccaaccagggggcaggcggagcagtgtccctccaaccagggggcaggcggagcagtgtccctccaaccagggggcaggcggagcagtgtccctccaaccagggggcaggcggagcagtgtccctccaaccagggggcaggcggagcagtgtccctccaaccagggggcaggcggagcagtgtccctccaaccagggggcaggcggagcagtgtccctccaaccagggggcaggcggagcagtgtccctccaaccagggggcaggcggagcagtgtccctccaaccagggggcaggcggagcagtgtccctccaaccagggggcaggcggagcagtgtccctccaaccagggggcaggcggagcagtgtccctccaaccagggggcaggcggagcagtgtccctccaaccagggggcaggcggagcagtgtccctccaaccagggggcaggcggagcagtgtccctccaaccagggggcaggcggagcagtgacgcttctgtttagaggcgtgtcctggcccttgtggcctttagtccccacctcagccccgttgtcactgggaaaggatagcttcagccaggtggagccatgtgcccagggcccttgcctagagggggaccagcccggtctcagcccagcccccaccggacccagcacctgccctgctccccagagcctagccgtggccgagccccagcctcagccccggggggtcaccagcctcctgcccgtctttggtggttgtggtttgaatatggaggcagttgtccagtcaggggcagggtgagcggccgcctctgggcttgcgtgctgggacttgtgcggtacagactgggtgtcccagtgacggcttccgaggggaggggcgggccaggacagaggtggactccatcggggcagctgctggtacaaccacctatagactagcccctccaggcaagacccagaactgggtgggagatttgacggccggcctgtctgccatgagctggagctgccggagagcccagaaggcacaggggtgacccagggcagccttgagctgtcctcagtgcagtgcccttgtgctcgggatgctcacggcatcccttcctgaggccgagagagagcacttcagagaatcctgagatgtgagcggaggtcaggccccggggtgatgcccaggatgatgcccaggggatccttattccctgaggccggcagccatgtgggtgcagtcgccagtagcccctgccctcggttaggcacccaagggagcccccaggcagagctgggcagcttcgttttccagaccttcactggggaagaacaaaacgttttgtgagggacgagggacaggaaacagaggccaccctgcaggttgtcacatttagggaaacagaggctgccctgcaggatgtcacccctagggagacagaggctgccctgcaggatgtcacctctagggagacaggggccaccacaggatgtcaggtctagggagacagaggccgccccgcaggatgtcacatctagggagacagaggccgccccgccagatgtcaggtctaaggacacagaggccgccccgcaggatgtcaggtctagggaacagaggccgccccgcaggatgtcatgtctagggacacagaggccgccccaccagatgtcaggtctagggacacagaggccgccccgcaggatgtcacatctagggagacagaggccgccccgccagatgtcaggtctagggacacagaggccgccccgcaggatgtcaggtctagggacacagaggccgccccgccagatgtcaggtctagggacacagaggctgccccgcaggatgtcaggtctagggaacagaggccgccccacaggatgtcacgtctagggagacagaggcagccccacaggatgtcacgtctagggagacagaggccgccccgcaggatgtcacatctagggagacagaggcagccccgccggatgtcacgtctagggagacagaggccgccctgcaggatgtcaggtctagggaacagaggccgccctgcaggatgtcacgtctagggaacagagggagccctgcagggtgtcaggtctacggagagcaccagctgaggggctggggctgtgcctggggcctgtctcctccctcctctgcagggctgccactggcatccactccttgctggcaaggtccccatcatgggtgccataaggtccccagagaaaaacataaagtcctggcacctggggccactcagatcccacttgtggggcttccaggtgggatgcgctccgcctcgcagccacctgccccacctgtgggcagcactgacttttcaaagccctttgcacggtagccgaaacacatatccctgtggctctgccctgatccttccctgtgcagaatgagttggaatcaacggggagatgcaagctggaagggccgatatggagacgcctggtgaacctgcagccccaggaggctgtcgttgccactgtggcctggtcagggttctgatcatcacagctgctgcgcacccagctgtctgcctgagcgttctgggaagtggctcttccttcacaccagggggaggcaggctggggaagcccggcgccatctcccactgcctctctcaggcatctggccctcctgcgtgtggggttgtgtgtggaggtctgctccgtctctgcaggcctctctcaggtgcctggccctcctgcgtatggggtttggtgtggaggtctgctccatccctccacctctcccatgcaggccgagtcgggggacgccccccagatctgagctgtgtctgggtggcctttcagagcctcagtggaaaggcgtggtggtccaggtgggttgcaagtcatgacctgggccccctgccctgacctgggatctcccagaggtggtcaggccctgtccctgaagccaggaggggcagaggctctgactgcccgtgctcgtgaagcattcctgctgggcctactttccagctgggggccccttgccctgggaccccatggtggcctagtctgtggcctctgtggctttcctgtgggcctcgtgtctgtgtagcccatgcgtcctcgccaccatgtgccctgcgcatgttctcactatcccagtctgccctgcactgtggcgtgggtctgaccctagcagccccgccaggtaggaggaggcaccgcgggcgtcctggtgccgggacagggtcagcaagacctgaatgagtttcagggctgaccccaggacgcctgtccctcaggtgtgcagaggtgggggcaccacatgggagccggagacgccgtggacgccaccctctcacacgcagagcccctgggtagaagggaggcctcagaaaccaaggatttcagagatctccaagccaggtggaggctgagccaaggcaaaaacaaaagccattcatcccctgtcatgcccagagtgggccaggaacggagttggggtccggccttggggtgcaactggccagcccatgtccccactcagatcccagcaccgctatctcctggttgtggcgagcaggggactctgcctgtgctccaagactcccaacactgccaccgacgggcgcgccagtgatgagttccctgctctcagcctgagcccgtgctgaggaaaagcaagcctaagaaattaaagcagcttttaaatgttagacctaccaattaaaaaaaagcagtcacatggaaacgtgcattttccagaactctgttgtttactccgtcataattaatacaggcagggaggaaagttcgggctctgtggacagcggttgccagcgtgggccacagccaagggactcggccctggggacgggaggaagggctgcctctgcaggttctgcagggccggggtggacaagagcctccctgggcccccagcctggaggtccccaggcaccacctgccttcctggactgagtggatgagaaagacaaggactggctgggacatcagagcctcagagggggcgtcgtgctggcctagccgggcaggcctcagatgtagcaggaccaggacgtcccccggcccctggtgagccctggccttgcccacactcctgtgtcctcttttttgctccaaggcccctcttcctcctgtccagctggcccagcccttccttgtcctttcccaggcagccctggtccaggggctcatcctcgggcccagccccctcacctgagccccgttcatcccagccgcagcagggcagaaactcaaaagatggcagcgaggggaccgtcctgttcctctgtctgaaaactcagctgcacacgcggggtgggggactgtgaggagtgcctatgtgacagcagaggcctgactgtgggtcatggggccagcaagggaccaggctgtggctggctgcctcccggggcatgaccaggacaccggcaggcagccctaccttgtgccgccccccgagcacagcaaaggcgggtttcaggggccctgagcactgagtcagaggctgtggaaagtcatcgcacccaccctcgcccgagacgtgggacagccgtgcctcctggtggggctgctgatgaaatcctcgggaaggtgccagtacggtccgcgctcgcggctcttgcctaagaaaccgtggctctggctgctgttggtgaggagtcctggaggttcccagagcctcgggcaccgagggggagaccctgacactgtcctgcctgccccaccagtctgctccccgcagctcctcgtcctcacccgagtgctgctggagggttggcaggaggcgtgaccagcagggtccagcacagtcagggtttcctggggggtccaggaaacaggatgagctgctgtgtggcagctcatggtcagctcggtctgaaggcctccctggggacacacaggcagcgaggtccaggctccctctccctcccccagggtgacagagcctgggagaggcccgcaggagtccctccagccgttgtggcccgagaccacgttccagggttgggttacgcgtggaacgtggaggcacgcggggtgcgcgtgggccctgccgctggcaggaagcagggactggtctggagcgtggcggggctgtgccatcttcggggctgtgccatcttcccttctgggtttgtggaggagccgcgagcagctcctcctgaacttttctttattaatgaatcttatctctgctcacacagcacgcagcggatacaggccgcgggtgataagcagagagcgagcaggccccaatgagaaattacctgctcgtagccagcagattagccgacagctggccagcgggggctgtgggggtgggcggtgctccgcgcgctggttcccccttcccatcccccaaccccggcaggggccgctggaggcagggggcccccacagaggctggcctgtggggactggcgggttcttccccgagcacctgggacaggctgagcccagagcgtggccccacgtcttcagccagaaccgaagcgagatgttccttcccttcatttctccctgcgcccaacccgacctgctggccccacaggcacacccctccccggtccagccatgtccctattcagaggcacgtgtggagaggcgtcagaagcaggagggcgcggggccttgccacaggctgaaggtctgtgtccctctaaaatccatacgttgaaattctaacgcccaagatgagggattaggaagtgcagcccttggactgggattagcactttatgaagaagccgagagctccctcaccgcaccccacgtgagcgcaccgcgaggaagtgcctgccctcagcagacaccacgtctgccggcgccttgagttcccacttccactccagaacctgagcagccaatgtctgctgctcataagccaccctgtctgtggggttccagcagctggacgcaaagagacagagcattggtaccaagagtggggtgcagctgtaacagaccccgaaagcctctctggagctggggagtgggagaggctggaagggttggggtggagcctgtgaaaagcagatgttgccgagaacaggccatgaaaggtgatgctggtgagggctcaggaggaagggaggagcactgtggagggagcccccatcttcctgcacaaggaatgctcccagaatcttaggagggggcacggacaaggccgctctgaggaggccgtgggtgtgtgtggtggtgaggggagacccgcctcgggtggagctgggctgggctgggctgggcccgggccgtgttttctggaaagtgagtgtgtgagggatgagactggagatttggccacagctctttccaggccaggcgttgaggtgcagcctttcctcccgctgttatagtcagatgcgggcacagaggggcggcctaggatggcatcaagcagaaggaagcggaacttaagcacctggggaatgctcagcttgtcgctgtcatcgctgctggagaaaacgagagcaaccctagggagagaaccctagggtgtggcccgcaaccgtttgatagggaggctcgtgtgggtgtgacctcaggccccgtctgccactgcggcagagacaccgccagctggaaccaaagaggagggagacgggaaggatgagggaggctgtcgacttggacttgacatgacaggaccacagagctgtcggccggcaaacacgcgcggctcttcaccgcagaggaagggtgaccctgaaggtggttcggaaaactcccagccgccgatgccttcttcagaggggaccgcagcccacgtgcctcccacaggccaggagctctgccagcggtgggcgcggggcctccccagtggacgagaggtggagcatggagccacagcggcagctctcaggcctctgggcctcacgggacttgcccctcggggtttggcctgcctggggcctggcaccctccctcttgcctttcccccttttgaaatgggagcgtccgtcccctcctgtcctgcctttgtctcccccgtatgtgacgccagtgaggttgagaggagactttggagttgatggttggtgagactgttggggctgctggggtggagaaggatgtgggttctgtggggacaggggcaggatgctggggaccgaggtttgtgtcccgcagttcccacgtggaaaccgaatccccactgtgaggggcatgaggaggcggggtcttcgggaggtgctgaggtggtagggtggggccctcgtgaatgggattaacatccttatagaggggaccccagagtccccccgccccttcccccgtgtgacagacagtgagaaagctccatcaccaaacaccaagtctgcctgtgccttaccctgcccttgtggcctccaggcctgtgagaagtgaactctgtttacgagccacctagtctgcagcggccgagaggaccaatacaggcttccacagggtaggttcccccacagcgggggttggggacgagctgccggggcccaggacgtccgctcgctgctggggctggggcagtctcagccactcccagccccagcgggctcagtacccaacaccgaggcaccggggccatggtgggtgcggcctgtcctgggtgctcagtgttggggctcagagaatgtaaagagcctggggcgggggtggaggtgccccaggggcagaggctgggcagccccgtgagtgatgtggcctccgccacgcctggatggggtggataaatgtacccgacgcccgtgatcgagctggtaattacccttcacaatgagtgatattaatcgtgaagctcccagtgcacggcatgagaatggcgccgggagctggcggcagcaggagaagccatttattagcctgataaatgaccaaaagatggcctttctggctggctcctgacaggactttctgataacagggccgagagtccacctgtcagacggccaggtggggcctgcccggtcctcccctgctcggccacccaggctgctcggagtgaaatcgtaggttgggagggggtgcagaggcagggccccttgcaggcgagtcccagctgcctcctgtcattgggcggggatggaagggtgggacaggaaggaggcagtgtccttctgagctcagcctgggagaggcagggggcccccgtgcagagggaggcgtgtgggtgtgcagggcggcggggacagtgtttctgagctggtgatcagtctgctgtggtcaggcaggcagggtgggggctggagcggggtcaggcatggcagtggcaaggaagcatggcataaggtcctctgtgcccaggaggacactggtgctaagcgtctgctgtcacctgcttctgtctgtcactgccgtctgatgcctgaccgggctgagcgtgtgtttgttgaatgaaggcagggctgccgtgtgcgtcctccctgccaggcccctccacctccgctctttccagagggaccgggctacctgctgttgctgtgccacccacaggggaggcaggtgtcagctccacacgcgtggggccttctcgccaggcctgtcccgacacagagggcagtcccgtgaggtggcaagttcccacagtcagcagtgccgctgctgttagaaggtggtggtggactgagatgacatccgcagtcccttccgcatcagggcccccacctcctgtacatccttggggtctcagcccagatgcacttcctcggggctctccctggctctcccgggctccagtctcctggtgcatgtcgttatcagctcccactccacactgggacaggaccctgagccttgagtcctgcgggtgcctcggccgccctgcgctgtgagctggcatgtgctcagtgcttggtgcgtgctagaggagcacgtgaaggcccggataaatgatgcagacatgggctccagggacagcggcccgtcctcggaggcgccccttccaggctcagcacgtgcggctctcagagtctcatttgttggctctcctggccttagagggcagcccgagggtcccagcagggcgtcttggctgggtgggctcaggaggcaggggaacagcaagtccggagtcattacaaggcctgtgccgacaccgggtgatttagcggtatgattacttcctaatgcagtatctcgcaaagctttttattagatttctccccttttccttccaaagtctctttggaaataaacacctggggctgttatacttcataccactcagtttaattaacttttaaatcacataacgtcacccggacctctcagatggcggcggtcgggccagggtggaagcctggctgccccagcctctccgcccagggagcggggcattgccccatctcagcctcagggatcctgagcctggactccccccagtgcaaggtccattgagggggacccttggaggggcagtggtagctcctggggctctgagtctaagggtggcagagacaccagccccaagccaggtcctcccagtccgggaaacccagtgagctccacagcctagtgctacgctgcaggtgtgggggcctgaacccagctgccgtcatccctgagaaactgcccaaacggtgcctctcgccaggtcagcaggatcctcgcccagtgctgggtcacgtccatcccaacctgtgtccccacaggaagcactttcttccctggggcttctccccgacccgctctgccccaagtctgggtcctgccctgggtctcgggcctcaggagggcccctccccaggccaacagattccagaacaatcttgtgacatctgcccccaacgtgggcaccagtgaaggttcccagcccctctcgttgccgctgacactgtccgcccacccgtgccgggccctgcctccccgagctcttcccaccattggtcccacccattgtttctgccactccagctcccgggcagcagccaggcgaaccagctgttggcaggcaggcgactctagctccctgggcagcacctaggaggcctggcctttggcaggcaggcgtcacagatcagttaggcccttctgcgcctgcctgggatgctgaacaggtttcgcgacactgtaagtgcctgttcctgagaaagcagaggtcgccggcactgaaggctgtgtccccagcaccttcccctgtgtggacctcccgccgtcttcctcgccacgccttcactaactgttccattctagttttcttcttcttgggaccgttttggttggtgattggtgactttccaggaatcgtgcattcctcgagttttcagactagccgtgctgtcccggggccccgagcagattcctctggccctggtcactggggtgacgcacagttcatcaggggcttcctgggcactgctggggacgcctctcatccacgaggatggcacgttcgaggtctgagctgtcccagcacggcctccctgtcggggtttcccgtgacctcgagtcccatctccaggacgaacgtgcagacaccctcccccaccttctccatgggctcagccatcagcccccaaccctgtgccagccgaggccaagctcttgctgccggctctggtctgggcgtgggtcacccccaccttccaccctgtgccggccgaggccgggctcctgccgcccgctctggtctgggcatgggtcaccccacagggttgccgccatcagtcagcagttgggctgggagggctacatgagtgcctgtagattctggcacagacgcttgtggcctgtgggcttacttcctgccctccctgccaccttgttggctccagccgggctgccacggtggacgcagggtcacagaagcttagggcaacacatttgtggtcctcgacccacggacgcgacgccaggcccttctcgtgtctcttcctgctctctgatgcccggaagctgcttcctatgggggtcccacacggggtcaggcaggtttcggtgtgccctccccactccccatcccaggaggggaggagctcctagttctgaggctgctctgtgcacggtctggcctgcagtgaacatgtgtttgctgttgtcgcaatcactgctgtcaccagtggctgggcagggccagtatgcaggggtggatagtgcggtgcctgatcacagggctagccctgtgccctggggtgcctgttcccctctgcgaacttgggcaaccatggctttgggggtccccggacctgggtccagccccgtgccttctccggcccaggccggctctgccgagtcacctgtgcagctccccggagtcaagcacaggctcggggcagtgagatcatctgcccaggccctgacccaccgtctggagccctgcaggaacttggggtacccccacctggacccactagaggaagcctgggccccacagccagtgtaaagcagcagcttctgttcatggtaccagggggctgagctgggcccaggcagctgggtggctccagaggtggcagggggtgagttcctaggaggcagggtgggcgcctcgtaagatagaactcttgtgggaaaggatgtctagcgatgggagctgcctggaggcgtgggtccagaggggccctcgggacctgactgggcgcctgtcggttccgtcctgttgccccagaaggggaggcctgcccaggggttcaggaccgaacaccaggtccaggggaagccgctgccccggccgccgctcacccacaaccactcagattaaggcgaacgagagtggtgagaacaaacgcctcacagagctgttccggaaattagatttttccccttaaggtcactcactccactggaaaattaaccaatattttcctaatcaaagcggggctgtttcttccttggaggaaggtggccgcccttccagcgcttgtcattcatcttggaggcaactgctgccgcgtgggctcttgttttattaaataaactccggtttttatggctgcctctcagtgccgcccgccccccgtccagggagagtggcctcaggtgtcgggcgccgcgccgtcctgcttccgctgccgctgccctgactgcggggtcaccttccctccacagcccctcagggccctcccagagccggcgtctgctgatccagcctcccctgtaccccagggggctctttacacctggggttccacctttagcccaggtgggagcagggagccgtcttgaagtctcacctaggacgccaggacgctgccgcttcccgttcttgggccacgccgagcacgacttcttggggcctgtccagcagtgcaggctgaggagggcgtggacccagtcggccacctcagtgaggtcctggctgccccctgcagacagccctgagcacccccgcctgcctgccactgtctcgacggggagggccgaccatcaggggtccaggcagcacttcataaagcaaagcttcacccggctaagacgtgtgggctgcttgggggctctgtgtctgcaaaacagtacctgtgaaaataaggaaccgtaggagacgtgggctggaaggacggctggtaaacatggcccctcctcacttggagatttgtgctgccaataacgaggacatggatgaggggcctcccacagagcagcgcttcccaagtgccgctgagtgaagaagccctcgacagcctcgcacagcatcagctccctgaccccgcatgtgcgtacgtgtgtgtgtgtgcatgtgtgtacgtgtgtgtgtgcatgtctgtgtgtgcacgtgtatgtgtgtgtgcatgtgtgcacgtgtatgtgtgtgtgcatgtgtccgtgcatgtgcatttgtgtgtgtgtgtgtgtacatgtacacccgtgctcacaaacaggctggagaactacatgccgtcgcctctgtgcccccgctggtgtgattctgagtgactgggtgatgggtgatgagtgttatttttatatttcaaaatagtgtgagaaggaggctgtcctattgaggcacagaccagtgggcaaggaccttggtggtggggggcacacaatcctctgggggacctgggctgcccctgtggggatgtggcatcccttgggatgctgtgggcagcacagtcacctccagggcccctggcttatcctcagcaactcagaattaagtgacatcttcgtccttctctggaccagttgttttccagagcaggtcagacagagctcagcttccccatctgccaggattcagccctgggctctcggaaccaggagcgcaaatcgctggtgctcggggtccatggtgccccttgagggctcacacagccttcccatgacccttgtcttctactcctggtagggtcttgaatcccaggagatcttgctctcccataagaaaagcagctgtgaaagcacagccgggcccggtgactggcccaagcctccgaggaggcggcaagcttggatggagtgtcctattcagcgtgagggcccggcatttccaccagtattcaaatggagccggaaacttcctgtttccattggcctgagaccccgggctgtccgtctgccctggcatgcacacagcccacccacacttctgtctacccgagtggccgatggtcagccgcacacaccaggaagcctttgctggggccggtggtggtgatgcttccagcacgggctgcttgcttgttggcatctgtgagtcctgacccttcctggggctgcagcaggcgtgagtgttgttgagggagggagagtggcctgcggacccagccctgagagcgacactaggtctgtgtgcccccaggagctcctccatcatcgtctctgcacaccccagccccgtcccaccacatcccacgctgggactcccagccgcttctctgtcatgagagtccacagttcatttgaaaaccagtgtggtcaggggctgagactggcttgcatctgggtggcctgttagccctggagaaaccggctgtgtaggtgagcagctgcgtgggtgagagtgggagcattgcaggtcacagggaccctctgtcccctcagcacgtgggagcctcacttgacacagcaagtggaggcctggagccggccaaggggtgctaggcaggccgattcgttcattcttgtacacagcacgcagcaagtgtgttccgtgtcccgggcccagggacgccgaagcgatgggaacccaggcctgcccagagctgaggtctccccagtgtatgcgtccaggctttgggagatgggccgagggcagctgctggagggggcgaggcctgcccagggctgagatctccatgctgtgtgcatcccggtttcagaacatgggccgaaggcagctgctggacagtgccaggactggtctggtctctcccatggaaccttccagctgagcttcccctgcagtggccgcccagtgggggctgggttgtgtgggacagaggacagctaaagggtagaggtctccactgtctcctggtagatacatcgggccccccacatcttcccaagtcacgtaacgctgcacaccctggtccgccccgtggtacctccgcgagcaccgcctgccatgcctggtttgctgctctgtaatccagcggctcctgcagtcctggcacgttcggttgtgtcccgaaagaaaaccagtgcttcctaaacagaaacggacaatcgtcagttggaaaagatgtgtggccttcaaacaaacaccctggaccagggaggaactccttgttcccaggacagacgggaaagtcagaggcctttaaaacatcatttccaaaatgaaatcacagaaagatacctgatggttgtgagcagattatctgtattccattcttggggccaaggagcaaatcagctgcagaacatgttttgaaatgtctctttgtaatgaatgtggtcaatgaaaacgcggagccatcagcaggaggcgaccgtcccaccgcaagatgaagaacctcccgtgataccattcaagccccacgagctggcagagaggaaacagcagcttcatacaggctgcgggtgctgatgaaatggaaaaggcacttcacacatcttgcacacgcaaattgcatcaggcggagtattctttgcaaagaatgaagcacttcctcctccttggctcctatgagggggagcggtcggggggcgtctggagcagggacgggccggcctcaggcttctcatcccctcgctccgggaacaacagaaatgcaaacacagcatgtcttcctgagccacgggcacggggccgggcactcggtcaccctttccttccgcccattccttgtgggggcagctcctggtcccagtgacctcccagggccgggcagtaaccttcgtggctggacacactcggcccaagcatcccctggtatctgtagtctccggttccggagggcacctcgggcacgagtgacccttggcatctcacggggtctcttggatgctggctcctgtggtggctgtggtgtcatccatcctgctggtgtttataaacctcctgaaccctctatggaaacactgtccgtgagggctgaccccctttatgtcccgtgtcctggctggaacctcaagtgtctttgcagagctggaggaaagggcagtgttccaggcccaggagctgtcagccatggacgtccaggactgcagcgccgggggcggcctgtgctgctgaccagcccctggccctgcgggaagggcagcagggggagactggccctggaaggttccccactgtggtctggggccggatggggctggtcccttcttcagttctggacgctggtgctttagggaaatgcctggggtttcagctacagcctgagactgcctgtgtggctgtcccttccccagtgacgctgaacgcatgtgcacatctccctggtcacgggcaccatcctggcaccaactgagtctcttggtctgtttctgagcacctcccctcccttggggagcgtggagagaagagcctgacacagctttgtccccgaggcagcaggaggcctttcctggggcttggagggatctctgcctccccagaaacagctcctggctctgaatgcccaagagcctgagggcagagaggacgccagaggtggtgtggagcgtgtccatctcctaaacagcgcgctcctccccgtgagccggaacccgacgcgtgtctgcgtggagcatgtccgtctcctaaacagcgctcttccccgtgaaccagagccggacgcgtgtctgcgtggagcatgtccgtctcctaaacagcgctcttccccgtgaaccagagccggacgcgtgtctgcgtggagcacgtccgtctcctaaacagagctcttccccgtgaaccagagccggacgcgtctctgcgtggagcacgtccatctcctaaacagcgctcttccccgtgaaccagagtccgacgcgtgtctgcttgtttccgagctgctgtttgtggtttgagtccccatgcagggcagcggagggaggtggcaagggctgtaacacaccaaggtcagagccgccggcctctcccacattgacattctgtgcactgcctgtgtgtgatcaagtctccctccggagcgctgggccctgcgtcagcctcaggaaagctacagacaagataggaatcatgcgtctccccaccctgagcccagcaggctgtgccaggtgtcaagtagctggtcagcgtatcagccacacagcattgctaggagggaagaggagaccccttcgctctgctctccccgctgcagtcagggcctgcctcccgcgcccgccaggtggggccttggctgcacagaccctgtgcccactgtgagtccaggagcctcgggctcaggcccctcctccccgcacccctgtcctccttctgatggcgggacagtgaccctggctgtgcccactcactgaccagcagcatactgtctccgtcctggcagcagctgtgcgaggcaggctttcctgtcccactcgcagaggaggacacgctcaggtgctggagtggcttgcacggtacggccacagccctgctgactgtacccacgcgcccctccacccctgcaggagcatcgaaggatcggatgcaaccagacgggtcccctctgtcagtgcccggcctgtgccaagccacagcaggatgtcctgggggaagcctggagaaaggagtgctgggccctggactccccccagctttggggggatggtcaccaaggggaggtgctgggcacgtggcagcctcggggagcaccttcctgggccagctgtaggcccgtcccaagctgcgtcccctgcctgcgcctctccctgggccgcctctgccccctgcagggctccgtgtcaagctccttcagcggggtgggacctcgaatgccgtccatgtcccacacctcgcgtgtcagggtctgcagtggagcacccaaccggcgtctctccccaggtctccccccagcctggaggtggccccttgtgcccctgggcccctacctgtccagcagcagcagctggggctccctgtccactgggagtgcttcctcaagcatgaggttttggcaggggggcctgtgggaccaccacacttctccccaagggcacaccggggatggcagagggtcgtgggaaagtgttgaccctcgtcaggtccccggggagcccctggcaggccgttctgtggctggatgtgagttaagcggttcagccgtgtgtgaggctccgtgacaccagccaggacacacctggagttgtggggatttttagttgccttctggtggtagtgaaaccgtgcagccttgcacaagtgttcctgcataggctccacttgctgcccttcccggccccactcacatcctgagtgtgtgctcaggcccctcagaagaaaccaaacttctgagtgtcccctccccgcccctagccatggagtggccgtggctgaagtggaagagattcagaggctgacagccgaggggaggtttgaacctcactaaaatcgttcggagctgacgctcgtttcagcattgcccacgctgtctgggtaggaggtgaattcgcctccacgtggcctgccgtggggcttcttcttgcagcgggctctcctgggtgctccaggaagacggagctgggacaaagtgtgcccactccagaagtgagtcttcagctcaggtctcctcccggccttggtttctgactccttcgtgttaggaaggaggcccccaggaggaagcacgcactttggcaatgagacgttttaattgcatcttaaaatagcattgcagtaaagaacactaaaccgtgactaaccaattgcacttcaggaggccctcagcacagtcagacacggggaagcgcggaaaagctgcccacttgtggacgcccatcaagccccctcaggaggggctggatgacagaggaggtctacaccgcacctgggccccttccccaggttcagccttcattgcggcctccctggccgtgagggacgtctgcgcaggagctccccggggccagctttgcctgaatgtggaagatggagggaagagtgttaccgtttagttgatttactgccgaagaacctgtaaggcccaggaagacagagaaagacgccagaaagagcatcattctgcagggttcaaggtgaacctggctcgctttcagaggagtagggcaacgagggcacccagaccctaattacacaggatcccggcactgtgccatcggggcctcatgtgtggtcttggtggagaatgaccagggctgctctctagcccccgtcctccagatggtccccagagggactgacacactcaaggaatgtgctactgggaagccaggatgccatttcagtaccagcagccccactgtgggcctcacttgaaggctgtgctggagcccggcctcggactcaccccagccagcccctgagctccaggcagtgtaccctccccatccgggaaccagccgcaaggcagcccgtgtgctgagccacagggagggccagctgggcgaggagctgacatgtgggacgcagctgtgcagcactcagaggccctgcccaccctcccctccaggacacagcctgaccgtgccctgggcctcggctgccttgcaggggcccaggtgaggagtgggaggtggaggcctctgcagctgcaggcagtagctactcagtaaatgatgggcccagcgatggacgaaggacgaaggcctccctcggggacctgaagaagcatagctgtctgtccctcgccgggtctcaggtggctgcagttactcagctcgcctgggacaggcctggggggccagtgagcacgcggcattgtggcagctcaggcaggcatgcgccggaagggattctggcggcctgtggactgggagaacctttccagctgccaagagttgccctttggatcctaagtgcagggccaagcccggctgtgacggctgaggccgggctcctggaggcaaggccacctcaggcctccagggccggagccgcagggagctgctgggtttccacagggccacgggggctgcggccacacggagcgggagcacaggtgggaagggtgtctgtgaaaagtgaaatctgtcgccgcttcctctggcttaattaccggcatggtagttgcagagttgaaatgcagctttaaaagcctttgtgagtaattagtgtcaaacacacaagatctacaaagccataaactcacagcttggtgatattaccaagtactaattaagaaaaaaaaagaaaattccctttcatgatcaaattttcagccctgccaaagacgaaaaacaaggcaatttgcagcggatggtgacgccggagggtaagtggcgtccacaggaagatggcggccgagcgcggcgagcaggcagggtctggctgagggctggggtggtgacggcgtgattgtgcctggctaccgggttctcagccagggagcacctgattcccagcagagatggaatcccagctcaggaaggggagactcatgcgagggcagaagcgaggcacccgcccagaaggattgggggtctccccatttcacaggtggggacactgaggctgagctcacagccaggacggggacagcagagtgacggccaagaccatctgccccgcgagggaagcagcgcccaccttccttggtggtccgggaaggccggactggccccttgggtccccaccggcctcagccactgtgggctcgtccagcttcaggcaggcgcccggccactcacctgggaggctctgagaacgacagcttctgtctcgtgagtgacgtggtgcccgctttcatcctggggcccacagctgccaggagaggccaggccgaggtcaggaggctcagcagccggttccgtgacttcctctttgctgaggaggtcaggacagaagcttctagatgacaggccgctcaacttggtataaaacagcaaatttctgtgcctgtgctgtcgggctgtgaatgacttctcgtctgtttcatgagatgcagcttcagcccagggaggcatcagatgcagccgggcgagacgcggagccaagagctgtcctcgccccccatgtgagtgactggagagacgaaattctcaaagtcttgtcacttacggggatatttttaacccaggaccagggaagcacagctctcattggtggccgtgtgctctggcgcttgggcagtgggcagcagccaggttatcgggacgtgctcaggcccaacaggacccccagagccgcacctgccccccacagagtagagccggcccgggagcagccttggtcacatctaatcccaccagccgccggcagtggagagctgtgcctggcccagagatttgggcatcacatccaggctgcaaacgcacggggaccacctggccccgccagggtttgctctatcctggcttggcctgcgtggcctctcgccgtctgcacggtccactcacccgagtcagggctggggcatgcagggagtgtgcagtgacattgggcagagggaggctgctcaggtccaagtaggcagagaaaccgcatgcccaggccgctaaaaccttgaactgcaggagccctgaactgctgttgctgttttattgttttgttttgttgtcagatggagtctcattctgttgcccaggctggagtgcagtggcgcgatcttggctcactgcaacctctgcctcccgggctcaagcgattctcctgcctcagcctcccgagtagctgggattacaggcgcccgccaccatgcctggctttttttgtatttttagtagagacggggttttgccatgttggccaggctggtctggaactcctgagctcaggtgatccatctgccttggcctcccaaagtgctgggattacaggtgtgagccaccacgcctggcttgttttactgtttatgacgcggctctgctgctgctaggacagatacttgtacagcccgattcaaagactgtgcagaggcgtctcccagataccccggggcgcactgcagtcaaggaaggctgcctggaggaggtggcctggagctggggctcacgggtgaattagagtttgtctggctgggttggggagatgtttctggcctcaggatctcacttgctcacgctcaccggctccagggcacccagcgtgcagggagagcagaggggtaggcctcgggctccaggccaaagttggggaaagagagtgtcagacctgggcttgggggatgactctgatgtcgtcctcatgggggatggttgaggaaagggtggggtgtggctcactcgtctggccctcacccatgtggaatgcccgccgtgctgggccccgctgcaggtgctggatgcgcagcagtaatgcgggggtcctgctccgcctgggcacgtcttccagcagggattggggggccgatggccaggcagggtctgtgctccatgcctaggtggttatggggggaggcggggagcctgggccctggccgtgggtggacctgtggcttgctgacctggtgcccagctgccccacctcccaagctgtgagaagccaggaccagccccatcctccatccagatggtctctgacattgccctgggagccggggggaggcgggggggatgttctaactgaagggcctgggcagcctagagcccttctgtatcttctggccaatggttttatctggtccactgcctcccaagcctgcacatcccatctcgcgcgtttaaactgttagaaagttactcctttgactaagccggaaatgctctctatggccctgtggatctgcgtccagttctccacgacattctgtttttggagcctttgtgaagaggctgggggtttgtcagccccactcggaagcgaacaggctggttccccgccccaggcccagcttgtcctgcgggcagctggcctgagagccaagcactccccaggccatggcaccgggtgggcaggatgctttcctgccaggcagggggcaggacgctttcatgccaggcaggaggcagagccctccctgggaccccgagtgtctgtcctgggtggggactagacggtgaccaccacctcgaccccgggcaagcccacctagccccaccctcccaccaagccctgctccacctacacgaagctgcggccagccccttttgcccccaacctaaatgactgaggagtctgttagggagggcctccctgttgctctaaagagcaggaacaggacatccctgccccagggcacggaggcagctggccatctgcgagtgggacccgccgcggttggccaagctcaggccatatgagctgggactggcaggcagttcctggctgcctcaaatctggggtccagactctctgctgacctcccagagcccggcgtgtctttgcacactctgtccttgtccccagcctcctccccgccccagggtgtgcctggaaccttaggtagtcttacctgtcagtcataccttcttctcggccagggactgtggatggcaggacgttcaccccgtggtcagtggctgggcctttctcatgaagcagcttgattgagatgtcatctacagagcgtgcagccatcaccacagtctatcttggaatgaatgcctttatcaccctggaaggaaacgtgccccatagccatcctctcccagtcccagccgtcggcagccgctgtctgtgttgtctctagactccgctacctgcagtgttgcagggagatgggctcagcggcgagtggtctctggcatctggcatctttcgctgagcgtaaggttttcacggttcgctcacattggaccacgtgctgacgctccatttgttactgatgaatcatacggtctagtgtgtggatagaccatggttgtttatccgttcatccgttgatagaacatttgaattgcttccgtttggggctattacacacagtgctgctgtgaacattcgtgtacaagcttgtgtgtggaaatgcatttttgtttctcttgggtgtacacccataagcggaagtgccagggtcacatggtaatttaactgtgagctttgtaaggagctgcctgttctcccagcttctccccgtcctccccagcacgcgccactgtctgcttttatgatgcttttccatcccaggggctgcgggtgccgctgggttagagggtccgtgaacctcctgagattcaaatgcaaaatgtgaagtgggtgttggcgtgggtttcgggtagagggactgcagcccctgcacggggttaggaatatgtttcccagtccaggcagagctacgcgggaatcacctctagacacccaagagggagcagttttgtctggagaagcagcacgctgccgtgtttcaccaggctggcctgtgacagctggacctgcccccgatgccaccacctcctcctgccagggcttccctgtttgctgagtctgcgttattgatgagctaccatctgtataaccgcacccgtgaggccatcaaggcannnnnnnnnnnnnnnnnnnnnnnnnnnnnnnnnnnnnnnnnnnnnnnnnnnnnnnnnnnnnnnnnnnnnnnnnnnnnnnnnnnnnnnnnnnnnnnnnnnnnnnnnnnnnnnnnnnnnnnnnnnnnnnnnnnnnnnnnnnnnnnnnnnnnnnnnnnnnnnnnnnnnnnnnnnnnnnnnnnnnnnnnnnnnnnnnnnnnnnnnnnnnnnnnnnnnnnnnnnnnnnnnnnnnnnnnnnnnnnnnnnnnnnnnnnnnnnnnnnnnnnnnnnnnnnnnnnnnnnnnnnnnnnnnnnnnnnnnnnnnnnnnnnnnnnnnnnnnnnnnnnnnnnnnnnnnnnnnnnnnnnnnnnnnnnnnnnnnnnnnnnnnnnnnnnnnnnnnnnnnnnnnnnnnnnnnnnnnnnnnnnnnnnnnnnnnnnnnnnnnnnnnnnnnnnnnnnnnnnnnnnnnnnnnnnnnnnnnnnnnnnnnnnnnnnnnnnnnnnnnnnnnnnnnnnnnnnnnnnnnnnnnnnnnnnnnnnnnnnnnnnnnnnnnnnnnnnnnnnnnnnnnnnnnnnnnnnnnnnnnnnnnnnnnnnnnnnnnnnnnnnnnnnnnnnnnnnnnnnnnnnnnnnnnnnnnnnnnnnnnnnnnnnnnnnnnnnnnnnnnnnnnnnnnnnnnnnnnnnnnnnnnnnnnnnnnnnnnnnnnnnnnnnnnnnnnnnnnnnnnnnnnnnnnnnnnnnnnnnnnnnnnnnnnnnnnnnnnnnnnnnnnnnnnnnnnnnnnnnnnnnnnnnnnnnnnnnnnnnnnnnnnnnnnnnnnnnnnnnnnnnnnnnnnnnnnnnnnnnnnnnnnnnnnnnnnnnnnnnnnnnnnnnnnnnnnnnnnnnnnnnnnnnnnnnnnnnnnnnnnnnnnnnnnnnnnnnnnnnnnnnnnnnnnnnnnnnnnnnnnnnnnnnnnnnnnnnnnnnnnnnnnnnnnnnnnnnnnnnnnnnnnnnnnnnnnnnnnnnnnnnnnnnnnnnnnnnnnnnnnnnnnnnnnnnnnnnnnnnnnnnnnnnnnnnnnnnnnnnnnnnnnnnnnnnnnnnnnnnnnnnnnnnnnnnnnnnnnnnnnnnnnnnnnnnnnnnnnnnnnnnnnnnnnnnnnnnnnnnnnnnnnnnnnnnnnnnnnnnnnnnnnnnnnnnnnnnnnnnnnnnnnnnnnnnnnnnnnnnnnnnnnnnnnnnnnnnnnnnnnnnnnnnnnnnnnnnnnnnnnnnnnnnnnnnnnnnnnnnnnnnnnnnnnnnnnnnnnnnnnnttatagttctaaattttacatttgtgttcatgatccattttgagtttttttttatatggtgcaaggtctggattgactctttttcattttttattgcatatgaacgtccagttactccagcatcaagatcattcttttttactgaatagccttttgcatctttgtcagcctgctaggattttaattggaattacgctgactctatagatcattttggggataattgacatcttaacaatatggaaacttctaatctatgaacagtttctctcagcaatgtgttctcattttcagtgtgcgggtatcagaggcatttgaaccagagtgactccattttgaataaggactgggtgaaataagactgagacctacagggctgctttcccagaaggttaggcgttcgtagtcacaagatgagagataggaggtccgcacaagatgcaagtcacaaagacttggctgataaaacaggttgcagtaaagaagctgaccccaaacccaccaaaaccaagacagccatgaaaatgacctctggtcagccaggcacggtggctcatgcctgtaatcccagcactttgggaggctgaggcaggcagatcatgagatcaggagttcaagaacagcctgaccaacatggtaaaaccccatctctactaaaaatacaaaaattagccgggcacggtggtgcatgcctgtaatcccagctactcaggaggctgaggcaggagaattgcttgaacccaggaggcggaggttgtggtgagctgagattgcgccactgcactccagcctgggcggcagagtgagactccgtcttaaaaaaagaaaaaagaaagtgacctctggtcatcctcactgctcattatactgtaattataatgcattagcatatgacacgacactcccaccagtgccatgacagcttacaaatgccatggcaatgtcaggaatttcccctatatggtctaaaagggggaagaaccctcagttctgggaattgcctacccctttcccggaaaactcatgaataatccaccccttcattagcatataatcaagaaatacagtataagtgttagtcgagcagcccacgtcactgctctgcctatggagtagccattcttctgtttctttactttcctaataaacttgctttcacttcactgtatggactcacctcaaattctttcttgtgtgagatccaagaaccctcttttggggtctagattgagaccccttcctgataacataggtatttcacatctttttcagatttatcccaagtattttagattttgatattattataaaagagttttgtttttacatttaatttctgttgctactatataaaaacaattcatttgtatattgatctttttattttgcaacttcgctaaactcatgtgttagttccagtagcttcttagtatatctgatgggattttctccttagacaatgatattatctgtaagtacacttgcacttccacttgcccacactggatgcttgtgaagttccttgttcttgtgttatttcactagctggaaccttcaggatgatgctgaatacaagcagtgagagtgaacatccttgtcctgtttcagatctgagggagaagcatccaatcttcagccattaagtgtggtattctctgtacgtcattcatagataccctttctcaggctgaggaagttctcttctaatcctagtttgctgagattttttttttttttttgaggaatgcctgttgggtttgatcagatgctttttctgcatttattgagttgatcatatggttttccttttgtactttgttaatatgtggaattactttgattttctagggttaaaccaaccttgtattcttaggataaaccccacttagtcatactacattatctttttttatatgttattggatgtgaattgctaaccgttttgttttgaatttttgcataaatattccttagggttgttccatagttttgggggggtgcggcttgtaatgtcttctgatttgtatatcatagtaatgttggtctcacagagtgagttggaaagcattcctcctcttcagttttcttaaagagttcatgtagaattcttgattaaaacaaactggaagaaaagagttaatgtagaattgatattatttcttttttaaatagttgatccaattcatcagtaaacccattgaaccttgaagttttcttcctgaggttttaactacacatcagtgtcttgatagacatagagttattcacattgtctttttcttttgtggtgagctttagtagtttgtatcttcagaagtttgtccattttatctgttttcaaaggtattggcataaagttgttcataatttctcttactatccttttaacatctgtaggatctgtagtgctatcatccctcttcttcctgatgttaataatttgtctcttctcttttattccaggtcagtctggctagaaacagctttgggttttattatttctactgcttttttgttttctttcaccattgttgctttgatctttattttctttcttctgcttactttgtctaatttgcccttctttagttccttaagatcgaagctgaagtccctgatttgagaccttcttttttttaatgtggacattcagtgctataagtttccccctagtttctgctctagtggcatcccacaaattctgatattttgtttttatcttcattcagttcaaatcacttaactaacctcccttttgatttcttctttgacgtatgggttatttagaagtgtgttagtttccacattttttgaaaatctccagatgccgttctgttactaatttctcatttaatttcattattgtcagagaacattctcggaacggtctaaatccttctactttttttggagacggagtctcattctgtcacccaggctggagtgcatggcgcaatctcagctcactgcaacctctgccttccaggttcaagtgattctcctgcctcctacctcagcctcccgagtaactgggattacaggcacgtgccaccacgcctggctaatttttgtatttttagtagagatggggtttcaccatgttggccaggctggtctcgaactcctgatctcaggtgatccacctgccttggcctcccaaagtgctgggattacaggcgtgagccactgcatctggtcacatttcttgaaatttgttttaaggtccatccagaatgttactgccttggtaaatgttgtgtgtgtacttgaaatctgtgtgtatcctgtatcctgctggaatgtgctatatcgatgtcaagtagctgacatttttaataatgtttgcgaagcttttatatccttgccaattttctgtcttcctgttctatcagttattgatagatgaatgttgacatctctgactattattacagatttctctattccttcttgcattccagtttttgtttcatatataaatggacgcttttatcattatgaaatgacctttattgctagtaatattctttgctctgaaatctgctttgtttgatacagagttgcactgtcaataagcaaccttgggtatatcacgcatttggttccagatcactgtgattaaaccaatatcacaataaagcaagtgccatgcattttgtttcccagtgcatataaaagttatgtttatcctatgctatagtctgtcaagtgtacaatagcattatgtctttaaaaaacaatgtacatgttctgattttaaaaatactttattgcttaaaaatgctaatgatcacccgaacctttagccagttgtaatctctttgctggtggaggttcttgctttgatggtgatggctgctgacagatcagggtggtggttgctgaaggttggggtggctgtgacagtttcttaaaaacaccagtgggctgggtgctgtggctcaagcctgtaatcccagcactttgggaggctgaggcaagtggatcacttgaggccagtagttcgagaccagcctggccaacatggtgaaaccctgtctctactacaaacacaaaaattagccgggcatggtggcacgtacctgtaatcccagctacttgggaggctgaggcatgaaaatcgcttgaacctgggaggtggaggttgcagtgagctgagatcacatcactgcactccagcctgggcaacagagcacgacttccatccccacccccaccccccaccccgcccccgccaaaaaaaaaaaaaaaacacagcaatgaagctggccacattgattgactcttcctttcatgaaagatttctctgtagcatgcaatgctctctaaaaccattttacctacagtagaacttctttctatcttggagccaagcctctcaacccctcaaactgctttatcaactaagttgatgtactttgctgtcatttttcaacaatgttcacagcattttcaccaggagcagattccatctcaagaaaccactttctttgttcattcataagcagcagctcctcatccattcaagcttgatcatgagattgcagcagtttagtcacatcttcaggctctgcttctaattctaattctcttgctattttcaccacatnnnnnnnnnnnnnnnnnnnnnnnnnnnnnnnnnnnnnnnnnnnnnnnnnnnnnnnnnnnnnnnnnnnnnnnnnnnnnnnnnnnnnnnnnnnnnnnnnnnnnnnnnnnnnnnnnnnnnnnnnnnnnnnnnnnnnnnnnnnnnnnnnnnnnnnnnnnnnnnnnnnnnnnnnnnnnnnnnnnnnnnnnnnnnnnnnnnnnnnnnnnnnnnnnnnnnnnnnnnnnnnnnnnnnnnnnnnnnnnnnnnnnnnnnnnnnnnnnnnnnnnnnnnnnnnnnnnnnnnnnnnnnnnnnnncatcagagcccagtaactagttgcattgtcagtgagcaataatattttgaaaggaattttgttttctgagcaggaggtctcaacagtgggcttaaaatattcagtgcactgtgctacgtttgaacagatgtgctgtcatccaggctttgttgttccactgatagagcacagacagagaagacttagcatcattcttaagggccccaagagctcatttaccgtctccatattagcagtaagcctgttctgctttcttatcattcatgtgttcgttggaatagcccttgtgatttcctttacgaacttctcctttgcaggctagctgtgtggtgcaagagacctagcttttggcctcagttttcaacatgccttcctcactaaacctaattatctctagcttttgatttaaagtgagagacatgtgagtcttctttcacttgaacacctagaagccattctagggttattaatgggcctggtttcaatattgttgtgacggtcgtgtctcaggaaatggggaggcctaaggagaaggagagagatgggggatggctggtcagtggagcagtcagaacacacacatttatcagttaagtttgctctcttatgggcactgtttgtggagctccgaaaccattacaatggtgacatcaaagatcacagatgacagagtaccataaaagatatactagtaatgaaaaagttggaaatatatacgacacagacatgaagtgaatccacgcttttggaaaaatagtgccaatagacttgccagacacagaccttaaacttgtaaaaaatgcagtgtctgtgaggcacagtcaggccacggatgaagcgaggtgtgctcatgtgaacacagggcgaattggcttctgtgagcacgctgtatctgcttcacgttacttttaatctactgcgtcttcatagttaaaatgtgcttcttaaaagcaggatatagctgagtcttaaatatgcataaaatctgacattctctgccttttcactgggccatttacatttaaattgattactactttgattagataagtctatcatcttgttatttgttttctgtttgtcctgtctgtcctttgttcttttttcttccctctttttctgcctttcttggattgaattttttacaagttcatgtgcctccttttttgatttgttaactgtattttttacaggttgtgttaggatttagggcacgtagatctttaacagtcatcctcgaatgatacgacaccgccttatgtgtagtgtgagaacctgacagtcacatacttccagtcttctccttcctgccttagtcatctgcttataatatattttatttatgcacatgataaaccccacaatactttgtttttatttctgtttagtcagctatctttgaaagagatgtaaataataattgtaaatgttgtatatgtctgcccatgcagctcccacccctcattcatggaaggagtagagctgttcttccttcttcttgtgtaggcccatgtttgtttttatttttatttattttttttgagacagagtctcactctgtcgcccaggctggagtgcagtggcacgatctcggctcactgcaacctccgcctcccaggttaaagcgattctcctgcctcagcctcccgagtagctgggattacagggatgtgccactgcacgtggccaatttttgtatttttagtagaaacagggtttcaccatgttggccaggctggtcttgaactcctgacctcaggtgatcctcccacctcggcctcccacagtgctgggattacaggcgtgagccaccggcctggcctgttgtgtaagcccctgtttgcatcctcattttccttctgtctgaagggcttcctttaatattcttgcagtgtgaatcagctgctttttgggatattttaagctcttgcacacctgaagaagtctttatttggggggagatatttccactgggtggagaattctgggctttgtctttctgtactttacagaggtgatctcactgtcttcttaattccagtatttcctctgagaagtctgctgtcattctcatctttgttcctctgtcggtcagttgtcatttcttcctctgactgcttttaagatttcatctgtactactggttttgagcagtttgattatgatgtactttgtgtactttaatgttgtttcctccccctgcctttttttttttttttggtggttggggttctttgaacttctcagatctctcagtttacacttttccacacatttcagaaaattggggccactactttttcaagactctttgctgtccccaccactggcaaccagtccttgaataacatcgctgcagaactcactggctcgtggcttctggggtcaggaatccaagtgtggctgagctggctctctgctcagagacctcaccagccacagtcctcttggctctgctggggaaggtcccatgtccaggtacacccatgtggccgtcggaaggattctgcttctatccgtggttgggctgccgcgcttggtcctatggcagctcctcgccgtgtgggccgctcacgcacggcagctggcgggtcagagctctgagaaccagggtgggagccgcagaagtcacggctgctgtgacgtgactgcagaggggaagccagcacttgcgccccactttgcatccgctgtaagtcacgctgaagggctggcgctgatgcgggtggtgcctggaggtggggaccatcaggagccatttcagaagtgccaccagcctgcctccaggactcctgccctacgtgtcaggccacgtgacgtcgccccacagcccacgcccaatgtgctgcctcctttatgtctatctttccgttttttcctttttgtttgtatgcgcttttctttctttttctcatctgtttcatctcggacggtttccgtggttgtatctgcagcttcactgatcctgttttcgccatgtctgatctggcacggatccgtcccccgtacttgttgtcttcatccttagaaggtcaatttggctcttttttgtcccttttatgtctatcctcaattttttgggcatatggagcaaagttacagtgacttaatgtgatctgccgcttctgacgtcaggtcagccctaggtctgtttcactcagctgattttctctttgttgagtgctgcgaggctgtgtgtgcatgtgtgcgtgtgcctgtgcatgcacgtgtgtgtgtgttcctataaatattcgtgagctctgttcggagacacagttcaggtacttggaaacagcctggttctctgggtctcggtttaggaaatgtgaggtgggagcagggcagcgtctgtctggggctcacaccgccccttgctgcggggtgtccatctcagtgctgtgccctggagccgcctagttcgcaggctttcccgcgaggctgccggagacaggcactggtccagcccagtgtgagcttcgggtgccattttctgggtttttctctctaatgctccaggttttctcagcctctcactgagcactccagcgaactcagccctcctctgtggcactcttttcggcgccctggctccagctccagccctgtccctcaactcgggtcccgcgaggccctgcctgggctgtgactgtctccccaggctcgccccgtctctcagggcccgccacccttcctgactgaaaactgttgtttcacatttgatgcctcatattctggctgtttcagatggcaggtgcatctgtccttgtggctctgtctcggccggaagctgccggccgccctctgaggtgggaaaataggcattttgtctccattttacattcaggaaacttcagctcagagagacaaactgatgggccccggggcccacagcagataagaggggcagcctcacaggagggcgggcctgcatctccggccctcctcaccccgcatccccagcatcacattgccctaagcgtggcgctccacgaaacgtcactgccagcagcatgggcctcgcctgggtgggaggtgagaaggcgcagaggccgctgacgtcctctcctgttctcattcggctacatctggaaagggtggtgctgtctagcccgggcccaggaggggaggaccccacacccgggacgggctcaggaggggaggaccccacacccgggacgggctcaggaggggaggaccccacagccgggacgggctcaggaggggaggcccccacacccgggacgggctcaggaggggaggcccccacacccgggacgggctcaggaggggaggcccccacacccgggacgggctcaggaggggaggcccccacacccgggacgggctcaggaggggaggaccccacacccgggacgggctcaggaggggaggcccccacacccgggacgggctcaggaggggaggccccacacccgggacgggctcaggaggggaggccccacacccggacgggctcaggaggggaggaccccacacccgggacgggctcaggaggggaggaccccacacctgggcggggctcagggagccactgggcgagggctgtgctgcagctcctccctcctcacccgtgtgcctgatctgagcacctgtcctgcctgcccgctgcgtccccttttttcccttaaccttcgttgtgttctgtgctcctgctgccctcggggccagtccctgtcttttaacccacactcagccccttctcccaccttctccatccccgccacctcctctaactcatccctgtggcctccatgcccttccacggcccttggagccgcccgtggcggatgccactcacagcaggggctgcgcaggccgccccaccccgagccggcgcccccactccctcggctcccctccggctgcggctgcaggagcagctgcgtgtggctgtaaagcagaacgcccgtgtgcgagggggagctgtataaatagaataataataataataattgttggtttgggatttttctgcgactgctggggtgcctggccttgcccgccccgccagtcactcttgaaggaaaggtcaccctcgccgggaagataaaccccaataacgctggtataattagcacaggcagtatttagatgctttcctcggtacaattaggcaggaataattggctgagctattttccccgtgccggacacactttttgccagcttccgttctttggaacttcatgccgggacatttgttctcggcgttctgtccaagctgtcctgacccagttgccgccaggccctcagcgcggtgctcacgcggcagcatctgcgaggcctcttttgggcccggctgtgtcgtctcccccgagggacgccggagggacagtggggcagagaggggtgggagctgagggtcgtgcacacagcagggtgtcctggggtcaaacctggacctctggaccaggagctccgcggagctgagctgggctgggcctggagctggagggcttgtgcagggtggggctgggccggccatgggcatccatgagggagtgaggccatgagcgggggagtcaggcataggctgtaacaagtcctgtggccagcctggaggaggaggccctcggccgaggtaatacaccagcagcgagaagcttgctctctccctcctcagagcgcggacgggccaggcagtgactgtcagggctcggtggtggctgctgctcctggatcaccttcgggccgtggatgtgcagcaggcaggctggccccacagcacctgagactcctgtgcagagcccagctgtgagttgtgaggctgccaggagtcctcggtatcccggtctaacaggttgcgtagaccacggtagcaccagccattttcacgctgtacccggcaggctcagcacggtcttgacgttatcacgcctgaactttgggatacagatcactgctgccgaggtcatgaagccaagctggggccgcgccgacctccaaccctggggctgggaccgtgctggcctccaaccccgcctggggctgggactgtgccgaccgccaaccctggggctgggactgtgctcatcccagggctgggactatgctgacctccaaccccggggctgggactgtgctgacctctaacccccagcagcacctgctgggatgagagcacacattacccaggtttatcacctctggaccctgatgccatggtccaaggccttcagcccctgagacgttttagggaagggagggcagccctggccgtggaggctcgtgcagagctgtgtgcatggtgagactgcccagcactgttcacaggcgctcagacgggcaccgcaaagacccgtggacagagctgtgccccacctgggatttgcacaagcccaacctgggtgccctggccgctgggtgccgaggggcttgggcccgtgtctctcacacctcagcagcagccctatgacaggtagcctcagcggactctgctgtggccacctgaccagcgccacccaccccaaccagctggctgggctcacgctgtgacccacgcctggcgtctgtggtgccaccagccaagatgccagccatgacgccagcctggcaccccaggcccaggacatctggggcaggtgggtgggcagcaccggcctcagcagcccacagaggggcctcccacagagtgtctggagacactccaggcagacgggcagatgagcaagacgcccgagggttgcaggccaggtggataaggattggggcttgcatgtgtccgcagtggggaacccgtgtgctcagcggcctgtcttgaagctgttccgctcttgcagatataatttagatatacatttttcctaattacaaatatgcagcatataaaaaaatctggaaaatgcagagaaccatgagtcactttccgtcccagcactccgagttaaccgccattaacattttgatgattttctaagagtccttttgcactctgtgagtgtgggtgtgagagtgtgtgtcgtgctgcagtgtgaacttgaagggttttctcacccctgaagttcagggctgactctcggcggacgctgctgagtcttctccccggctcgccccatgtgtgcatgaaagtgcctgggacgcgtcagattctcaacttgagacgcccggaaagtcttttgaagttgaaaacactttgatttcctgacagcctcaagacaaaaaaaaatctccccttcgctggctttgagagcaggtgtattctacaagcgaggttcacagggacctatggctgccccggcagatgccatccaggcacgcccctctcctctcccgcgggtcctggtgggggagcctctgtgggaagcctgggggctccggggcctggcagacaaccagtcctgctgcagcgaggtggggacaaggccgggagcagctcacttcccagtagaggccatccgatggcgccagggcacggggcagctgctgtcctcatggcccggggtaacgtgggcacagggtttcctcatcccactgtgctctgtgtctcccctgagcccggtgattttacgcacctgacttcgttagtcttctcggcaatgcccagcgtgcagaccaggctcaagagaggtgtgtcggtgtgcccagggtcacgcagcttcctggtggccaagccgaggttagaagctagttctggtgggtgcgaaagcccccgatgtcggcagctctgccaccaggcccgcacaagcaggtggtgtaagaggggaggcgttggggccggcagtgctcaagtcaggattgagccgtctatctggaaggtctgttgagggtgtgtgctggtggccgggaggtggtggcaggctgactacctgccattttcctgcagtgcctaggcccaggagagggagcagcccccggtcaggacccagctgcaggacaccccatcctcatggaccttgcttcccgctctccgtccccccacaaatgggctcccagcataacttcccccgagggctcctttcctctccccacacagagccctgctccggagcggcgcttgcagcacaccaatgacaggaggattgggcttcagggaagcaggcgcctggagctgtgtccagttaggtgcgtggcgcttgcagatccaagcatgaaatattcatgcctcccccggcccagcagctgcggcttctcatctggaacaagggggtgcttctcccaggaaggccagtgggagcaggggtgtgtctgagaatgcctgggcgctctgccctcacgatggccgctgatgccacaggcccggcctctgtgcccaggccactctccagcctggtgaggtctgttctgggaaaagagagaagcaagacagatgtgggccttgccctgtggggccagggcacaggcaggaatcccacttggggttaagacgctgcagtcacccctccaggtgccagggtcccctgtggccgtggcgttctaggagagatgggcagggagacgctggcgccctgtcgtgtagcttatccttgtatctgcttcacaggctcttccactgtgcaatttcctaaaattttggcgaggcccatttatccattttaattttattctgtggattgtgctttggtgttgagtgtcagagctctgcctcatccagatcctgaagatttcttttttaacataattctgtgttttacatgtaagttcgtgatacagtttgagttaaattttatttgagatgtgaggtttcggtcaaaaaaatttttttttaactaagtgtgtccagctcctccggctccagctgtagcaaagacaaggctgcccttcctccactgaagcgcctttgtgacttttctgtgacttttccgtatcgattaatagggtcatatgttgtttattctttagcctgttgatatagcagattacattgattgattttcaaataccaagctagcctcgtacacctaaacgaagtcccacttggtcacggcataatnnnnnnnnnnnnnnnnnnnnnnnnnnnnnnnnnnnnnnnnnnnnnnnnnnnnnnnnnnnnnnnnnnnnnnnnnnnnnnnnnnnnnnnnnnnnnnnnnnnnnnnnnnnnnnnnnnnnnnnnnnnnnnnnnnnnnnnnnnnnnnnnnnnnnnnnnnnnnnnnnnnnnnnnnnnnnnnnnnnnnnnnnnnnnnnnnnnnnnnnnnnnnnnnnnnnnnnnnnnnnnnnnnnnnnnnnnnnnnnnnnnnnnnnnnnnnnnnnnnnnnnnnnnnnnnnnnnnnnnnnnnnnnnnnnnnnnnnnnnnnnnnnnnnnnnnnnnnnnnnnnnnnnnnnnnnnnnnnnnnnnnnnnnnnnnnnnnnnnnnnnnnnnnnnnnnnnnnnnnnnnnnnnnnnnnnnnnnnnnnnnnnnnnnnnnnnnnnnnnnnnnnnnnnnnnnnnnnnnnnnnnnnnnnnnnngtctccacatctcccctccagtgctgccccagccatgtctgtctgacgtaggagccgtataacgctgtgctgtagctgtacggttctcaacatcaggaagggcaattcctctactcttcttttttggaattgctttccatatacattttacaataatcttgtgtctctctaccaaaaaaaaaaaaaaaaatgctggccgggcatggtggctcacgcctgtaatcccaacacttggggaagccaaggcaaaaggatcgcttgagcccaggagttgggagaccagcctgggcaacacagggagaccccatctctatgaaaaaaatacagccatgagtggtggtgcgcacctgtagttacagctacttggcacgttgaggcaggaagattgcctgaggctgcagtgagccaagaccacaccactgcactccagcctgggtgacagaataagaccctctttccaaaaaaaaaaaaaaatatatatatatatatatatatgctgaggtttggacagcaattaccttaaaaccaaagatcaattttggaaaaattgatttactataagtcttccagttcataaacattgtatctatttatacaaacattctttttattcctttcgattcctttcatcagtatttcctaactttctgcaaacagacactatacaagtttttgttagatgtatacccgagtatttaagatgttctgtaaattatattgccttttaattttgtttttcacttgtttgcaattgctttatagaaatgtggttaatttttgtatgttcatcttatttcctgcaaccttcgtggactcacttagtgttccaggagttttctgcagattgctcaggattttccacgtgggccgtcacgtcattctaggagttttctgcagattgcttagggttttccacgtgtgccgtcatgtgatttccgagtagggacagttctgttcttttccaatccctatgctgctgctttccttttcttacctgcatgccctggcgtgaggagctcccatgctgggttgaggatgagtggggaaagccagctctccgctgaccgaatgagggaaggcggccagactcttccgtgaagcagcgtgagctgagggttcttcgtggtgctttttaccaagtcggaggactttcccttgattcctgctttgcaagagttcttgtcaggaatggagattaaattttttcaaatgctttgcctgtgccaataggatcatatcattgtcttcctttagcctgttgatagggtggataacattgattgattttcaaatttgaactagccgtcgttgtacacctaaactgaatcccacttggtcagggtgtgatactctttttcgtgtgttgctggattccatttgttagtccttgttgagtatttttgcagctaagctcatgagagactgatacttatttttctttgtgtgcgcaccatccttgttggtttcagtacagggttcatagtggaaaggtgtttctctgtcttttgttaactgaaaaaggattgtgtaaaattggtattaattcatatttaatgttcggtaaaactttctagtgaaaccatctgggactggagattttgagtagcattttaattagaacaaacttgatttatttaatggttataggactaccgaggctattttatcttggcacgttttggtagtatgtggttttcgaggaatccatccagtttgttatgagcatcaagttttgttgtagtattttttattgttattttaatagcttctggatctattataatatttccatttcatttctgatattggtcatttcactctcccccccgccttttttttttttgagatggagtctcgctgtgttgctcaggctggagtgcagtggcacgatctcggctcactgcaagctccgcctcctgggttcatgccattctcctgcctcagcctcccaaggagctgggactacaggcacccgccaccacacccggctaattttttgtatttttagtagagatggggtttcactgtgttagccaggatggtcttgatctcctgacctcgtgatccgcccacctcggcctcccaaagtgctgggattacaggcgttccccctttttaatctttgtcagttttgccaggggtttatcaatttatcgttgctggtctttctaacaaatttttgagacagggtttcacttctgttgcccaggctggagtgcagtggtgtgatcatagctcactacagcctcaaactcctaggcccacgtgatcccacatacctggggctacaggtgtatgccaccacacnnnnnnnnnnnnnnnnnnnnnnnnnnnnnnnnnnnnnnnnnnnnnnnnnnnnnnnnnnnnnnnnnnnnnnnnnnnnnnnnnnnnnnnnnnnnnnnnnnnnnnnnnnnnnnnnnnnnnnnnnnnnnnnnnnnnnnnnnnnnnnnnnnnnnnnnnnnnnnnnnnnnnnnnnnnnnnnnnnnnnnnnnnnnnnnnnnnnnnnnnnnnnnnnnnnnnnnnnnnnnnnnnnnnnnnnnnnnnnnnnnnnnnnnnnnnnnnnnnnnnnnnnnnnnnnnnnnnnnnnnnnnnnnnnnnnnnnnnnnnnnnnnnnnnnnnnnnnnnnnnnnnnnnnnnnnnnnnnnnnnnnnnnnnnnnnnnnnnnnnnnnnnnnnnnnnnnnnnnnnnnnnnnnnnnnnnnnnngtttctggttttgatgtccactggtgtggcctccacctcttcacgccaccccacagatgaacagcattcacataacttcccagtatctcgaagtagcatcgtttccatttcctgcgtgtcttctcattttactgcattatttcagctttccttgtttgagccaggattcagggcttccttcattccatctctagcttcctcccctcgagtttcccagttcatggagtttctcttggaccctcagcagcagggggtcttgttcttgacaggaatccctcacacttcccccttggcctccgagccccaccacatcctgcggttggtggtgtgtggagaaagtggtgtgtggagagagttggtggtgtgcgctgtctctgctctccaagccctttgtcagcccccacccctccctcactccgtgcctcttatccgtgcccgctgggacaccatggggctcggctcaggggatggtgggaccagcgcttagtaagactagtcagccctaggcaccgagtgagcactgctcacgtggcagagctggaatgggggccgggcacacactccctggcccacgtgttccacggacatgctgcagaggtccccggccctccagggcaggccctctctgcttccagaggggcaggtgagccccaggccaggccagcgagggtctggactagagtgcagtggccacagtggacgccgcgagtgtcttcattaagagtgagtgtctcagtctcccccagggcgcccgccagccacagggccgctatgtgcgcagactagacaggtggcagctcgggccggccaggcagagggagaggaagccagagcctgcgcgcaggcagcctcagaagtatttccagccacagccaacgtgtcttactggcaatttgctttttaaaaaattgcagtttaattttaagtgagcagcccgtaattacagtgatttacgaggtacctggggactgtgtgatatttgaacatggcagagggctgagcagcgatggcagagatggatgggcccggcgccactcattcagcaggtcctgctaatgccggagcgttagaccgaggtggagcctcccaatgtggctgggtacgctgggggaaacggagtcagaggtgggctgcacggcaggtcgacttgttcaccgggggctggtgttttgcaaacgctgggtctgccttcgtgtggggtttgagctgggagagtagcactggtcactcctgcctgtctccgtccacccccacccccacctggagggcagcccggtatcttagggcgtcattcttccagagccgcctgaggccggcagagaggaggtgctgtaggagccgtgagtgggttgcccggcctaccattgggagcagctgtcttgctgacgctggcggggtgcacctgtttcaaataaagaatgatcagagctcacgcctgtaatcctcacgtcgtgggcagctgaggcaggaggatcacgtcaggccaggagtttgagaccagccaggccaggagtttgagaccagcctgggcaaaatagctaaagtctatctatctctcaaaaaaatttaaaaattagccaggtgtgctggcacatgcctgtcattccaactgctcaggaggctgaggtggatcacttgagtccgggagctcgaggctgagtgacccgttatcatgccactgcactccagcctgggtgacagagtgagactcgtctctaaaaaaaaatatttttagaaatgaacggccaggctcccaaagcctgccagcctctgagggccggggaaggcgggtgcctggaaaacagctattctctggtccagcctggccagagtctgcaccacagtgcgtcaggcccagccaggttgccagccctgggttgggaggagggcgaagggccggctgaggagacttcttcccacactgcctccccacccctgcccggcagctgcaggagaatcagcccctctgacatttagggggagaaattcagaatcaagagcagaaggcagaagtgaaaggattttctcagcgaaaggtcagagtggtttctcttgtttttgtttaaaaatggtttgtgttgaactatgacaaggccaaatgtactaaggcagcagaaacagggggagggcagggggagggcacggggacggctcctgagaaacaggaggtgcaggaacaggtcaggtcgcagggcctctggggcagcacgtgctccaaaggtggtgaggggaggggcgacaccatcagggcggggcccagcccaggcatgctccggtggacaggggagctgccaggaccaagctggatggagccaggccgccctgtggctcctggggagggttcccagagggctgccgggcggagggagcgctttccaaaacggtttcctgagctccgatgcacacacatgcagctcaccctcacgtctagcgctccattagtctaccgttccgttcctcccggcacattcagtgcgcagccgcgaccagtctaaccgtggcacatttccactggccctgagccctgacgtgcccctccaggacatcccctgggcacggagttgtgtcgacaggtctctgtgactggctgggcgtgttttcggggtttgcccgcgtggcagcgtgtatcagagttcggctgtacgaagcggtgttgacgggtaaacccggttttgtgtctccctccggcggttgagggctggttccgcgttccatctgttggtgatgggatcgtgttgccgtggacacccgtgccgaggtctgtgcgtggactgcgctcagaccccctggctgcgcgcccgggcgggtgctgggcccatggactctgcgtccagctctttgaggagctgccggctgtttgcagtggccgcaccacacacgctcccgccagcgacgcggagggtctgattcccctcgacccagcagctcatggtggttgctctcagtggccgtcggcgcgaggcggctccgtgtctcgctcagttgcggttcacgtttccccggtgcccagcgtcctggcatgagctcattggccgtgtgtggctcttctctggagaaatgttcaagggccccttgtttaattggctctttcctcttcatggtggagttgtgggagttctgggcatattctgggtacaggacttttcagggacgtggtttcagagggagctttgtggtgggccgggtttgtgtcctgcctgacctggggctgtgtgggtgctgaccggggtggggctggctctcgggggcagctcagaagggcctctgtccactccccacacagcccaggaccgtggcacagcagcttgctcagacctgctgtgtgactcctgccctgtgtcccctggggcctgcagcgctgtctggaagctcctccttgcccgttctccagttacaggaggccgccctctgggctgcagaatccacagagccagactccccctgggcccccagcgcccccctgcacaagtggggaaactagatcatggggcccaggcagtgtggaaggcgttgcaggacttgcccagggcgtggggtcctccagcctcagtgaagagtggcactagggcctggcacaggtgctggagccccccaggtggaggaaggagcaaggtggcagccccttgggtgggcacaccccacagtgcctgggacccccaactgcctgggtagatgacagtgtagacaacagagaccttgccctgggttaattcagtccctttaggtgacctggaataaggcctggcagggttgaggacgcatctacccctgtccaggtcctcagactgagggaagcccccatggctggaggggctgtgtagggagggaggggagagggagaggcctgtcgggctgaccgctgtcttgtctctttcttgactgccccgcaggccaccagcccctcgggttccaagatgcagctactggagacagagttctcacacaccgtgggcgagctcatcgaggtgcacctgcggcgccaggacagcatccctgccttcctcagctcgctcaccctcgagctcttcagccgccagaccgtggcgtagcctgcaggctcgggggcatagccggagccactctgcttggcctgacctgcaggtcccctgccccgccagccacaggctgggtgcacgtcctgcctctccagccccacagggcagcagcatgactgacagacacgctgggacctacgtcgggcttcctgctggggcggccagcaccctctccacgtgcagaccccatgcgtcccggagcctggtgtgtgggcgtcggccaccagcctgggttcctcaccttgtgaaataaaatcttctcccctagacactcccactcgccctgtgtatctgtggcctagccctagcagggtgggcgggaggaggggaaggagctccctcagcagccgccgccatctgcagcccggacaacgttagggtgagtcaggcatctctgctcagggagtgcacaggtggcagctgggaccaagggtggctggggtgccctccccaccaccatgggctgaggcccctccgcgtagcagcttccagctctgcctcaaggccgggccccagctccaggacttccctttgctgatggaacccggatggaggcacaggggctggggggactgtcctcacagataagggtgcatcgaggggagactgccctctgtgcccatctctccagggccaagagagggcctggacccggctggcagcaccaaacccaggggtgtggggtggctccgccccatggggcagatggagcatctggccctggaggctggagagcgagtcccctcctcccaactcggcggccccggccttctccagccatggggaatatgagccgatgattcagaggtgcagctgccgctatctgagcccagcagaggggagctggtgcagccaggggaacggccttgctccagagcctccaatgctgagacggagggagacccatggtgggggcgggggcagggggaggaaggagcagggaggcgtggaccctgccacctgcctgcgaactgtgggcctgggccagggccacgcccgggactgccgcctccacccagactcctcaaaggtggggcagctccgccggctctgccannnnnnnnnnnnnnnnnnnnnnnnnnnnnnnnnnnnnnnnnnnnnnnnnnnnnnnnnnnnnnnnnnnnnnnnnnnnnnnnnnnnnnnnnnnnnnnnnnnnnnnnnnnnnnnnnnnnnnnnnnnnnnnnnnnnnnnnnnnnnnnnnnnnnnnnnnnnnnnnnnnnnnnnnnnnnnnnnnnnnnnnnnnnnnnnnnnnnnnnnnnnnnnnnnnnnnnnnnnnnnnnnnnnnnnnnnnnnnnnnnnnnnnnnnnnnnnnnnnnnnnnnnnnnnnnnnnnnnnnnnnnnnnnnnnnnnnnnnnnnnnnnnnnnnnnnnnnnnnnnnnnnnnnnnnnnnnnnnnnnnnnnnnnnnnnnnnnnnnnnnnnnnnnnnnnnacgaggctttgtgcgggacgcaggctgtgcagacaagagaagtgagatgtctccatgtcacgtgaaggttgttctgccctggctcggcccctggacacacatgtgcctcagacagacacacagccccgccagagctgggcaaccactggctctcacactgaaacccggagtcccagactgttcggccccatcgcagccctggggtggccacagccccatgtctcagctgagcacagcggggcccacacaggatgctgctcccacagccacagataatcagaacggggccctggtctagcctttgggctgtcctctgccaataccccccaggtcaatcccagggtcctggcaccccagcccccaccaccctgctttccccatcaccattcctgccgtgccacagcctgagagccgaggtgcctgcctccacccaccctttcaccgccagcagccccggtgacggcccccacacacactcatggacctggggcttctgggaccgagccccactcagctggcccttcaggaccagggagccagcaccaccctggctgtgaacacagagggacaggggccggttcttgtcaaggcaatttaggagatggggtccgactggaccctgaaggcggatgggaccccaccaggtaggaagcggggatagggtgggcccagaggctggaggtcaggggccatcctgggggaggacagagggctgagccctcaggcagaacagaagcccgcagcctctgccccaggggcagcagggggagtggtccctggtgggcgacagccgggtccaggtccaggcaggagcccccccaaaggtggtggtcttgattgcaaggccagagctaaactccagccagcccaggtgggaatggaacttaccaggaggatttggggcagaggctgagaaaatggagagtggggaggtgggctcagcctcaggaggcactggcacggctccccccgtggacacacaccccactgactcccgcggtggacacacaccccactgactcccccggtggacacacaccccacggctcccccggtggacacacaccccactgactcccccggtggacacacacccctcagctccgggaccctgggaccactggctctgccatcaccgatgcataacctggtggctgaggagcaatggtcacggcctccaaccacaccagaaaaaccgcagcaggggttcccacagccacagaccctcatggccacaggactccacccactgtccccaagcccttgtgtcaccttcccaagatctgaggctgctgaaccttctggttgctgcagcctgggccacggcccacacctgccttccaccccggcttctgtggcatcaagacgggcttggcagctaaagggccacaaacaagccccctgtccccaggtgcaatctcaagtctgcatctggacccggggcgccttcctgacttggtctccccttccccgtccacatccgcatccggaccaggggtaccctcctgccttggtctccccttccccctccacagccagggatctccaaagcaccttcctttcggggagcccggggccggcacctcccctgccggctccccgggagggtctacaagaggctgggccccccagccagcgctgagatgcaccagctccggccggcaggcggctctgctctgatcatgggattttcctttccccgggaagaggcagaggcggggctggagcagccctcacacccccaagggacgtgtctgggtgggctggagagagcagaggtctctgataacatgtgtcccttgcgggctgatttaataaaccttccccacgagtttgtcaaatcctcttcacgcgtctgccaggtggaatgggaaagaaacagcgtgtgaggaccccaggaggcgccaccggtcccctgtccctgcccagccctggctgccgggccagagaaagttctggttctggcagattccccgcttccccccagctccttagtgggcacccaacgctaaatggttcttaagccgctaatgactaattttaagggattagtgctgcagcaatcaactgtaattgccaggatgtaacaggatttggggggccccagggctccctccagcctcccggcaggccggagaggacagtgccacctgccggggtctctgagggatcaacctccctccctccctcccactgcacctggcaccgggcagccagcacaagaccattgcagggttagtctgtctctttccttcccacagacaactcgtgcaagttttggagaaatccctgggttttctgcagcccctcacttctcagagtggggtccctggaagcacctgagaaaggcaggtcctcaggtcctgcctggagcaactgtgagaatctacctttaacaagtctctcccgcagctcgtacacacagaggctctcatcggcttggaacttgccaattggcaatgctcatcctcatcccatactgatcctgcaagtctggtcttgtcaggagaggagacctcagtgcagaaagccagggactggcccaccaacgcctcctgcaagtctgtgttgggcagggactcaaaccctgctctcttgactgcaaattcagctgcccctccaggccccagcgtctgagttaaacttggcccattgccctcctgttaaaatgtcaccaggacaccatgggcaggcgagggctgggaccttcatccagagacagcattggagggagactcagaggtccaggggctcagaacctcgggctatacatacaggagtgtgtttacaggcatgtacatgcagaggtgtgggcatgcaccactgccactcctggacacatgacccgtgtacacgtgcacatacaggcatgtgcagtgcatgtccccaggcttggtttgtgtgtatacatgtgccgtgtgtgtgcataactgcatttgtgtattggtgtgtggccctgtgtgcacatgtgtatgtacagatgtgtgtacgtgcatgtatccctgtatggtttgtgtacatgagcatgtgtgtacatgtgatgtgtgcatgtgtgaccacgtgtattggtgtgtcatatgtgcacataggtgcatatgtgctcctgtgtgcaagcatgacttcacatgtgcgtactggtgtgggccatgtgtacacgtgttcatgtgtgcacacatgactgcatgtgtgttggtgcatagccatgtgtgcacatggttgcatgtgtgtgcacctgaggacaggcggcttcaccagaatgcttaaatcgctgcttgcggcccagagaggaggagttccctgtccgaagtcgcacagtgagagacggccggcaaggaggcgccaggagcccggtccagacatcagctggcccagcctggcagtctcgttttgttttatgttttctttaactgcacaattcaaatacatttttaacactaaaacaaaacaaagttccctccaacaatatgagaggaacgtagagtgaaaaggagaagtcccttctggcccccatcccagactctcccgcctgtgggtggatgtgcacacctaccatatggacacacgaaaacacacggttctgcctccctgggtggtctgtgtgcttttaaaatccctacgtattgttccgcagcttgctttttctcacttcacaatatgtcttggaaattttccatagacgcgtgtactgatctgtttcactggattttgctgttgttgccaacactctcaagaaattttattgaaaacggtgacacacagaaacaccagattctcattttaaagtaaaactgacagcatttttcagaacttccatagttctgaaccatttgtgtcactatctttcaaagcaaaacaaaacaccgagtcccagatcccaacgagcagaggtggccctctgagagccacggggagaggctccggggaaacaggccctgccgattgatgtcctgatcttggacctgggcccccagaacctcgagaaagaactggtgcggcggaggccgccccggcgggtcgtagtctggggtttgtttacagcggcaggagctgcccaattgatccttacccatgagtaagccctcccttcccctcatctcctgagccagctctatcctttcttccggcgttccccactacctggcgttttgttcaatgcatagtttatttttgatagacatagactgcacatctgttccagcagatacagtcatgtttcagacagattagcgtcctcacagaacagcgctaatagagacgccacgcgaaccgcatacgtaacttgacattttttagtagccacgttaaatagtaagcagaagccagtgaaattaatgttagcaaatacacctctaacccaatctatccaacatggcatcgtgtcgacgtgtgaccaatgcgaacggtgaatgggaccttccacagtcggctttggtctcggggatcccgctggattttccacttgtccctctcggttgggcccagccaccccgggcgcccctggctctggcgtgtcacacccgtggggaaggaggggccttgtcacgttcaccgagggagctggcgcctgacagtcctggctcacaccggtgcacaggtgtgtgcgggtgaatccatgctgcgtggtgacaggtgatgttgtgctgtgtccctactcgactaatgagaaaactggaaccagagaacaggggaagcggctgtcccagctctggtgtcgctgggcacgggcggaggcggtggcagagccaggcctggctccctcctgggcagagggacagaggtgagcagtgagcactgcccaccaaggaccggggacctggagctcatggcccctcagcttcctctgagcaccccctcctcccagacggagccaggggctgggcagccaggcgcaccccggccgggacatcaggagacctcagttgaatgctggctcagcccagcctgcgggatggtcgtgggcaagggtcctcccctccctgggcctcagtcttcgcatctggaaaacggaccacatgacctgccaggggtgtccacctggcccagcacccagcccgggtaggggacaccccagggcgcagtatgtggcctcttcagcataacactataattagcccaattacccaccgctttcatgcttttttttaatttaaaatggaaattaaattttgcagcaggtttacaggctgttaacggaattcactaatcaaacccaacaccaagtcctcgaaaatgagaattcaaaaaggtctatatttgcatattcatgtttttaatagggttcagaaggtatatttgcagctgatgaaaggattaattaaatctatttgcattggtgaagcattttaaccccttcagagctggccggagaggggaaggccctgaggcccagtggtaaacgaagcctcaggcggacggctagaggtgctgctcctgccgccccttcctggggccacccatctggcagggagcctccccccgagcccagtatggcagggctgagtgggccccagacctggagccttcacagctgccccatggcagccctgtgacaggagatggcttcaggagtttttactttaaaaacaaacatacactagaattttggttttttataacattcatactcagtcactgtaacatatttagaaaatgtgggaaagtctcaagaaaaaaagaaagtcactgaagtccgggtgcggtggctcatacctgtaatcccagcactttgggaggctgaggccggcggatcacctaaggtcgggagttcaagaccagcctgaccaacatggagaaaccccatctctactaaaaatacaaaattaggcagtcgtggtggcgcacgcctgtagtcccagctactcgggagcctgaggcaggagaatcgcttgaacccaggaggcagaggttgcggtgagccaagatcatgccattgcactccagcctgaacaacagagcgagactccatctcaaaaagtcacttaaacacgcccactcagcaatgctcctggaggctcttgtcttcccacccctcctccgtgtacgtgtgttgtgtgagtgctcatgtgtacatgtgagtgtgcacacacgtgttgtgtgcacgtgtgtgttgtgagtgtgcacacatacctgtgtgttgtctgcatgcacacgcacacacaggcagaagcacccctgggacccgcagctctcacatatatgtcctcatcaaggtctcacttgcacaccaggtggacgctctgcaggtgggaccaccctcctctgacgcagccctgcatgaccccatgagggccaccccacagctgctcagagccctggtgcagtcgggggccctggtcacctttttcatggatgtgtggggtgaggacgggtgcggtgccctcccctaacaccccagaatcttcaggaagggggtgtcttggcagctttcacagctcgcatccaagtgggctctaggtacagacactggagttatacagacactggagttatacagacactggagttatacatgcaacacacgcctggagacacacaacagaaatgcccagaacatgtggacacgggcagctacatacatcacgtgtgcgtcgtgtcacacacaagcagctacagacatcacgtgtgcgccgtgtcatatagacagttacagtcatgtgagcgctgtgtcatatagacagttacagacatcacgtgtgcaccgtgtcacagacaagcagctacagacatcacgtgtgcaccgtgtcatatagacaagcagttacatcatgtgtgcgccgtgtcatatagacaagcagctacagacatcacgtgtgcactgtgtcatatagacagttacagtcatcatgtgtgcaccgtgtcatatagacaagcagctacacagatggagctgccaaattcgggaatcgctaacaggagccactcccatcattaaacccaagttgtttaaatactgctttttgacaatacacatagaaatatatatatatatacacacacacacatttatatatgtctacggagaaatatgtactatatatttaaatatatacacacggaaatgtatacatatatacacatatttttttttttgagacggagtctcactctgtcacccaggctgaagtgcggtggcgcaatctcgactcactgcaacctccgcctcccaggttcaagcgattctcctgcctcagcctcctgagtagctgggattacaggcgcccgccactacgcccagctaatttttttgtttttagtagagacggggtttcaccatgttggtcaggctagtctgaaactccagacctcgtgatccacccgcctcagcctcccaaagtgctgggattacaggcgtgaaccaccgcacctggcccacacatttttttctttttgagacagggtctcactattgcccaggctggagggcagtggcatgatcatagctcattgaaacctccacctcccaggctcaagcaatcctcacacttcagcctcccgagtagctgggaacgcaggcacccaccaccacgtctgactgattttttgtatttttggtagagacggggtttcgccacgttgcccaggctggtctcgaactcctgacctcaggtgatcctccagtctcggcctccaaagtgctgaaattacaggagtgagacagcacacctggcctatgcacacatatttatacatatatttatatctacacagataaatatctcaatatgtacacatttctacagacaatatataccatatttatgaagacacaaataattttttcagggaatttggaccatactgcatatgctgttttacgttatttctgttttcactgaaaattagaatatgaggctctgtccacgccattatgttcctccagaagtgtggtttcaacggccgccaagagccccactgactgccttaaatatctgattccccctttttgtcaggaaattcagtttttccctttcgttatgattatttctcagcagtcacctctaagccacgagccccccgacctccagcccatgccttacaggagcctcccgggagatcaccagggagcgggaggaggcttggaggctccagctgagttgctttttcccaattcactcccggagtgggcccccaggttgcagaagagaaaccgaggctcagggagaccagcaacacagccatacagtggtggtcactgagagcgggagaaatgtacgtgggaaggagacggagtttgtagtttaaagaaaaagcactggccaggcacggtggttcacgcctgtcatcccagcacttcaggaggccaaggcgggtggatcacctgaggtcaggagttcgagaccagcctggccaacacggtgaaaccctgtctctactaaaaatacaaaacttagccaggtgtggtggcacatgtctgtaattccagctgcttgggaggctaaggcacaagaattgcttgaacctgggagacaaaatttgcagtgagccgagatcacgccactgcactccagcctggctgatggaatgagactgtctcaaaaaaaaaaattaattaatgaaaaataaataaattagctgggtgaggtggcacatgactgctatcccagctacttgggaggctgaggcaggagaattttttgaacccagaagatggaggttgcagtgagccaagatcgcaccattgcactccagcctgggcgacagagcaagactctgtctcaagaaaagaaacatggccaggtgcagtggctcacacctgtaatcccagcactttgggaggccgaggcgggcagatcacctgaggtcaggagttcaagaccagcctgaccaacatggtgaaacccccatcttctactaaaaatacaaaaattagccagatgtggaggcgcgagcctgtaatcccagctactcgggaggctgaggcaggagaatcgcttgaacccgggaggtggaggttgcggtgagccgagatcatgccactgcaccccagcctgggcgacaagagcaaaaaaactccatct

SEQ ID NO: 927 - DNA, 3091 bp, Homo sapiens
atgggcgccggcggagcggagggagatccgagcggcggcggcaagctggctgcgagcggctgaggagctgggatacactcttcctctcctctcctcaacagcagcactccaagctcgccggcctttggtctccaggacttgtcccagcagcccctcgaactgagaattacaccatcggacccctggctctgaggccttcagacttggactgtgtcacactgccaggcttccagggctccaacttgcagacggcctgttgtgggacagtctctgtaatcgcgaaagcaaccatggaagacctgggggaaaacaccatggttttatccaccctgagatctttgaacaacttcatctctcagcgtgtggagggaggctctggactggatatttctacctcggccccaggttctctgcagatgcagtaccagcagagcatgcagctggaggaaagagcagagcagatccgttcgaagtcccacctcatccaggtggagcgggagaaaatgcagatggagctgagtcacaagagggctcgagtggagctggagagagcagccagcaccagtgccaggaactacgagcgtgaggtcgaccgcaaccaggagctcctgacgcgcatccggcagcttcaggagcgggaggccggggcggaggagaagatgcaggagcagctggagcgcaacaggcagtgtcagcagaacttggatgctgccagcaagaggctgcgtgagaaagaggacagtctggcccaggctggcgagaccatcaacgcactgaaggggaggatctcggaactgcagtggagcgtgatggaccaggagatgcgggtgaagcgcctggagtcggagaagcaggagctgcaggagcagctggacctgcaacacaaaaaatgccaggaagccaatcagaaaatccaggaactccaggccagccaagaagcaagagcagaccacgagcagcagattaaggatctggagcagaagctgtccctgcaagagcaggatgcagcgattgtgaagaacatgaagtctgagctggtacggctccctaggctggaacgggagctgaagcagctgcgggaggagagcgcactgccagggagatgagagagaccaacgggctgctccaggaagagctggaagggctgcagaggaagctggggcgccaggagaagatgcaggagacgctggttggcttggagctggagaacgagaggctgctggccaagctgcaaagctgggagagactggaccagaccatgggcctgagcatcaggactccagaagacctttccagattcgtggttgagctgcagcagagggagcttgccttgaaggacaagaacagcgccgtcaccagcagcgcccgggggctggagaaggccaggcagcagctgcaggaggagctccggcaggtcagcggccagctgttggaggagaggaagaagcgcgagacccacgaggcgctggcccggaggctccagaaacgggtcctgctgctcaccaaggagcgggacggtatgcgggccatcctggggtcctacgacagcgagctgaccccggccgagtactcaccccagctgacgcggcgcatgcgggaggctgaggatatggtgcagaaggtgcacagccacagcgccgagatggaggctcagctgtcgcaggccctggaggagctgggaggccagaaacaaagagcagacatgctggagatggagctgaagatgctgaagtctcagtccagctctgccgaacagagcttcctgttctccagggaggaggcggacacgctcaggttgaaggtcgaggagctggaaggcgagcggagtcggctggaggaggaaaagaggatgctggaggcacagctggagcggcgagctctgcagggtgactatgaccagagcaggaccaaagtgctgcacatgagcctgaaccccaccagtgtggccaggcagcgcctgcgcgaggaccacagccagctgcaggcggagtgcgagcgactgcgcgggctcctgcgcgccatggagagaggaggcaccgtcccagccgaccttgaggctgccgccgcgagtctgccatcgtccaaggaggtggcagagctgaagaagcaggtggagagtgccgagctgaagaaccagcggctcaaggaggttttccagaccaagatccaggagttccgcaaggcctgctacacgctcaccggctaccagatcgacatcaccacggagaaccagtaccggctgacctcgctgtacgccgagcacccaggcgactgcctcatcttcaaggccaccagcccctcgggttccaagatgcagctactggagacagagttctcacacaccgtgggcgagctcatcgaggtgcacctgcggcgccaggacagcatccctgccttcctcagctcgctcaccctcgagctcttcagccgccagaccgtggcgtagcctgcaggctcgggggcatagccggagccactctgcttggcctgacctgcaggtcccctgccccgccagccacaggctgggtgcacgtcctgcctctccagccccacagggcagcagcatgactgacagacacgctgggacctacgtcgggcttcctgctggggcggccagcaccctctccacgtgcagaccccatgcgtcccggagcctggtgtgtgggcgtcggccaccagcctgggttcctcaccttgtgaaataaaatcttctcccctagacactcccactcgccctgtgtatctgtggcctagccctagcagggtgggcgggaggaggggaaggagctccctcagcagccgccgccatctgcagcccggacaacgttagggtgagtcaggcatctctgctcagggagtgcacaggtggcagctgggaccaagggtggctggggtgccctccccaccaccatgggctgaggcccctccgcgtagcagcttccagctctgcctcaaggccgggccccagctccaggacttccctttgctgatggaacccggatggaggcacaggggctggggggactgtcctcacagataagggtgcatcgaggggagactgccctctgtgcccatctctccagggccaaga

SEQ ID NO: 928 - protein, 443 aa, Homo sapiens
MRETNGLLQEELEGLQRKLGRQEKMQETLVGLELENERLLAKLQSWERLDQTMGLSIRTPEDLSRFVVELQQRELALKDKNSAVTSSRLEKARQQLQEELRQVSGQLLEERKKRETHEARRLQKRVLLLTKERDGMRAILGSYDSELTPAEYSPQLTRRMREAEDMVQKVHSHSAEMEAQLSQALEELGGQKQRADMLEMELKMLKSQSSSAEQSFLFSREEADTLRLKVEELEGERSRLEEEKRMLEAQLERRALQGDYDQSRTKVLHMSLNPTSVARQRLREDHSQLQAECERLRGLLRAMERGGTVPADLEAAAASLPSSKEVAELKKQVESAELKNQRLKEVFQTKIQEFRKACYTLTGYQIDITTENQYRLTSLYAEHPGDCLIFKATSPSGSKMQLLETEFSHTVGELIEVHLRRQDSIPAFLSSLTLELFSRQTVA

SEQ ID NO: 929 - DNA, 3023 bp, Homo sapiens
atgggcgccggcggagcggagggagatccgagcggcggcggcaagctggctgcgagcggctgaggagctgggatacactcttcctctcctctcctcaacagcagcactccaagctcgccggcctttggtctccaggacttgtcccagcagcccctcgaactgagaattacaccatcggacccctggctctgaggccttcagacttggactgtgtcacactgccaggcttccagggctccaacttgcagacggcctgttgtgggacagtctctgtaatcgcgaaagcaaccatggaagacctgggggaaaacaccatggttttatccaccctgagatctttgaacaacttcatctctcagcgtgtggagggaggctctggactggatatttctacctcggccccaggttctctgcagatgcagtaccagcagagcatgcagctggaggaaagagcagagcagatccgttcgaagtcccacctcatccaggtggagcgggagaaaatgcagatggagctgagtcacaagagggctcgagtggagctggagagagcagccagcaccagtgccaggaactacgagcgtgaggtcgaccgcaaccaggagctcctgacgcgcatccggcagcttcaggagcgggaggccggggcggaggagaagatgcaggagcagctggagcgcaacaggcagtgtcagcagaacttggatgctgccagcaagaggctgcgtgagaaagaggacagtctggcccaggctggcgagaccatcaacgcactgaaggggaggatctcggaactgcagtggagcgtgatggaccaggagatgcgggtgaagcgcctggagtcggagaagcaggagctgcaggagcagctggacctgcaacacaaaaaatgccaggaagccaatcagaaaatccaggaactccaggccagccaagaagcaagagcagaccacgagcagcagattaaggatctggagcagaagctgtccctgcaagagcaggatgcagcgattgtgaagaacatgaagtctgagctggtacggctccctaggctggaacgggagctgaagcagctgcgggaggagagcgcgcacctgcgggagatgagagagaccaacgggctgctccaggaagagctggaagggctgcagaggaagctggggcgccaggagaagatgcaggagacgctggttggcttggagctggagaacgagaggctgctggccaagctgcaaagctgggagagactggaccagaccatgggcctgagcatcaggactccagaagacctttccagattcgtggttgagctgcagcagagggagcttgccttgaaggacaagaacagcgccgtcaccagcagcgcccgggggctggagaaggccaggcagcagctgcaggaggagctccggcaggtcagcggccagctgttggaggagaggaagaagcgcgagacccacgaggcgctggcccggaggctccagaaacgggtcctgctgctcaccaaggagcgggacggtatgcgggccatcctggggtcctacgacagcgagctgaccccggccgagtactcaccccagctgacgcggcgcatgcgggaggctgaggatatggtgcagaaggtgcacagccacagcgccgagatggaggctcagctgtcgcaggccctggaggagctgggaggccagaaacaaagagcagacatgctggagatggagctgaagatgctgaagtctcagtccagctctgccgaacagagcttcctgttctccagggaggaggcggacacgctcaggttgaaggtcgaggagctggaaggcgagcggagtcggctggaggaggaaaagaggatgctggaggcacagctggagcggcgagctctgcagggtgactatgaccagagcaggaccaaagtgctgcacatgagcctgaaccccaccagtgtggccaggcagcgcctgcgcgaggaccacagccagctgcaggcggagtgcgagcgactgcgcgggctcctgcgcgccatggagagaggaggcaccgtcccagccgaccttgaggctgccgccgcgagtctgccatcgtccaaggaggtggcagagctgaagaagcaggtggagagtgccgagctgaagaaccagcggctcaaggaggttttccagaccaagatccaggagttccgcaaggcctgctacacgctcaccggctaccagatcgacatcaccacggagaaccagtaccggctgacctcgctgtacgccgagcacccaggcgactgcctcatcttcaaggccaccagcccctcgggttccaagatgcagctactggagacagagttctcgctcaccctcgagctcttcagccgccagaccgtggcgtagcctgcaggctcgggggcatagccggagccactctgcttggcctgacctgcaggtcccctgccccgccagccacaggctgggtgcacgtcctgcctctccagccccacagggcagcagcatgactgacagacacgctgggacctacgtcgggcttcctgctggggcggccagcaccctctccacgtgcagaccccatgcgtcccggagcctggtgtgtgggcgtcggccaccagcctgggttcctcaccttgtgaaataaaatcttctcccctagacactcccactcgccctgtgtatctgtggcctagccctagcagggtgggcgggaggaggggaaggagctccctcagcagccgccgccatctgcagcccggacaacgttagggtgagtcaggcatctctgctcagggagtgcacaggtggcagctgggaccaagggtggctggggtgccctccccaccaccatgggctgaggcccctccgcgtagcagcttccagctctgcctcaaggccgggccccagctccaggacttccctttgctgatggaacccggatggaggcacaggggctggggggactgtcctcacagataagggtgcatcgaggggagactgccctctgtgcccatctctccagggccaaga

SEQ ID NO: 930 - protein, 691 aa, Homo sapiens
MEDLGENTMVLSTLRSLNNFISQRVEGGSGLDISTSAPGSLQMQYQQSMQLEERAEQIRSKSHLIQVEREKMQMELSHKRARVELERAASTSARNYEREVDRNQELLTRIRQLQEREAGAEEKMQEQLERNRQCQQNLDAASKRLREKEDSLAQAGETINALKGRISELQWSVMDQEMRVKRLESEKQELQEQLDLQHKKCQEANQKIQELQASQEARADHEQQIKDLEQKLSLQEQDAAIVKNMKSELVRLPRLERELKQLREESAHLREMRETNGLLQEELEGLQRKLGRQEKMQETLVGLELENERLLAKLQSWERLDQTMGLSIRTPEDLSRFVVELQQRELALKDKNSAVTSSRLEKARQQLQEELRQVSGQLLEERKKRETHEARRLQKRVLLLTKERDGMRAILGSYDSELTPAEYSPQLTRRMREAEDMVQKVHSHSAEMEAQLSQALEELGGQKQRADMLEMELKMLKSQSSSAEQSFLFSREEADTLRLKVEELEGERSRLEEEKRMLEAQLERRALQGDYDQSRTKVLHMSLNPTSVARQRLREDHSQLQAECERLRGLLRAMERGGTVPADLEAAAASLPSSKEVAELKKQVESAELKNQRLKEVFQTKIQEFRKACYTLTGYQIDITTENQYRLTSLYAEHPGDCLIFKATSPSGSKMQLLETEFSLTLELFSRQTVA

SEQ ID NO: 931 - DNA, 3027 bp, Homo sapiens
gagctgggatacactcttcctctcctctcctcaacagcagcactccaagctcgccggcctttggtctccaggacttgtcccagcagcccctcgaactgagaattacaccatcggacccctggctctgaggccttcagacttggactgtgtcacactgccaggcttccagggctccaacttgcagacggcctgttgtgggacagtctctgtaatcgcgaaagcaaccatggaagacctgggggaaaacaccatggttttatccaccctgagatctttgaacaacttcatctctcagcgtgtggagggaggctctggactggatatttctacctcggccccaggttctctgcagatgcagtaccagcagagcatgcagctggaggaaagagcagagcagatccgttcgaagtcccacctcatccaggtggagcgggagaaaatgcagatggagctgagtcacaagagggctcgagtggagctggagagagcagccagcaccagtgccaggaactacgagcgtgaggtcgaccgcaaccaggagctcctgacgcgcatccggcagcttcaggagcgggaggccggggcggaggagaagatgcaggagcagctggagcgcaacaggcagtgtcagcagaacttggatgctgccagcaagaggctgcgtgagaaagaggacagtctggcccaggctggcgagaccatcaacgcactgaaggggaggatctcggaactgcagtggagcgtgatggaccaggagatgcgggtgaagcgcctggagtcggagaagcaggagctgcaggagcagctggacctgcaacacaaaaaatgccaggaagccaatcagaaaatccaggaactccaggccagccaagaagcaagagcagaccacgagcagcagattaaggatctggagcagaagctgtccctgcaagagcaggatgcagcgattgtgaagaacatgaagtctgagctggtacggctccctaggctggaacgggagctgaagcagctgcgggaggagagcgcactgccagggagatgagagagaccaacgggctgctccaggaagagctggaagggctgcagaggaagctggggcgccaggagaagatgcaggagacgctggttggcttggagctggagaacgagaggctgctggccaagctgcaaagctgggagagactggaccagaccatgggcctgagcatcaggactccagaagacctttccagattcgtggttgagctgcagcagagggagcttgccttgaaggacaagaacagcgccgtcaccagcagcgcccgggggctggagaaggccaggcagcagctgcaggaggagctccggcaggtcagcggccagctgttggaggagaggaagaagcgcgagacccacgaggcgctggcccggaggctccagaaacgggtcctgctgctcaccaaggagcgggacggtatgcgggccatcctggggtcctacgacagcgagctgaccccggccgagtactcaccccagctgacgcggcgcatgcgggaggctgaggatatggtgcagaaggtgcacagccacagcgccgagatggaggctcagctgtcgcaggccctggaggagctgggaggccagaaacaaagagcagacatgctggagatggagctgaagatgctgaagtctcagtccagctctgccgaacagagcttcctgttctccagggaggaggcggacacgctcaggttgaaggtcgaggagctggaaggcgagcggagtcggctggaggaggaaaagaggatgctggaggcacagctggagcggcgagctctgcagggtgactatgaccagagcaggaccaaagtgctgcacatgagcctgaaccccaccagtgtggccaggcagcgcctgcgcgaggaccacagccagctgcaggcggagtgcgagcgactgcgcgggctcctgcgcgccatggagagaggaggcaccgtcccagccgaccttgaggctgccgccgcgagtctgccatcgtccaaggaggtggcagagctgaagaagcaggtggagagtgccgagctgaagaaccagcggctcaaggaggttttccagaccaagatccaggagttccgcaaggcctgctacacgctcaccggctaccagatcgacatcaccacggagaaccagtaccggctgacctcgctgtacgccgagcacccaggcgactgcctcatcttcaaggccaccagcccctcgggttccaagatgcagctactggagacagagttctcacacaccgtgggcgagctcatcgaggtgcacctgcggcgccaggacagcatccctgccttcctcagctcgctcaccctcgagctcttcagccgccagaccgtggcgtagcctgcaggctcgggggcatagccggagccactctgcttggcctgacctgcaggtcccctgccccgccagccacaggctgggtgcacgtcctgcctctccagccccacagggcagcagcatgactgacagacacgctgggacctacgtcgggcttcctgctggggcggccagcaccctctccacgtgcagaccccatgcgtcccggagcctggtgtgtgggcgtcggccaccagcctgggttcctcaccttgtgaaataaaatcttctcccctagacactcccactcgccctgtgtatctgtggcctagccctagcagggtgggcgggaggaggggaaggagctccctcagcagccgccgccatctgcagcccggacaacgttagggtgagtcaggcatctctgctcagggagtgcacaggtggcagctgggaccaagggtggctggggtgccctccccaccaccatgggctgaggcccctccgcgtagcagcttccagctctgcctcaaggccgggccccagctccaggacttccctttgctgatggaacccggatggaggcacaggggctggggggactgtcctcacagataagggtgcatcgaggggagactgccctctgtgcccatctctccagggccaaga

SEQ ID NO: 932 - protein, 443 aa, Homo sapiens; identical to SEQ ID NO: 928

SEQ ID NO: 933 - DNA, 75826 bp, Mus musculus
  misc_feature (1)...(75826): n = A, C, G or T/U
aaaccagccaaagactggctataggtaaccacaaatgaaagcaatcgagcaagctggaagcaagttgaatagaaggaattctctctgggatcttcaagctgttctctaataggtaagaaagtgttcctgcaggggttactctgtgtctctcatacacaggggtgtgcacacacacagggtaggagcacacgcacacactcttggtttcttctgtttgcagtaacgcgctagtcagtcctttacaggaaaaattaccttttggtctttgtgtgatgtgacatcctagggtgtccctgaacagccaggaagcaatacaatgcatgccagaaagttctgaaaagggcataacaacagcacagcctgacatctaccagacaggaagaggcggaagcttggcctcggctcctcatgctttcgagggtgagtgtgtggaatggcacactctaaagtggggtgttcaagctgggggtgcagctcactagcaggatgtgtgtctagcatgcactgggttctgggttccattgctagcaacacacacacatgaatgcacacatgaaaaaaaaaccacatgtggtggcacatacatgtaatcctagcacccagcctgtagcaggatgattgtaaattccaggtcacccagggctacccagtgagtctcagtctcaaaaatctaaaagtgaggctgggaagatgattcagtggctaaacgtctgtctcacaagtacagggaccagagtctggagcctcaggagtcacatctgtaatcaggaggtggcatgtcacactgcgtgactttccccaggaagtcttgaacggatcactaagcacaccagatagggcactgacaacacaatcgaaagaaacatttcattcaagtctacctcagtgagacaatgagttcactagggtccctctcgggagcctgggtaagagaaggggtctctcagaaacatgagtccttataagaatctgggagacttagggagctacatcgtggaagacccacctcaacccatccctgggctctcaatgtaaactacagttagctacaccaccagagagtgactcaggtcgtgggaaaacagaactgtaattttattctgtttaaattacaatgtcatctgacgcagtgcttgtggctggtgatatctgaacttggtagcatagctcgttagccttattcggggtttgccaacacaaacaaaccctccagatctttaaaagaaactgttgaatgaaggtgagagttcgataaatttatttttgtgtgattttttttggtttcgtttttctcttttttacccccttcctttctccttcctctctgcccccccctcctttatttcacacaagattttatgtagctaaaagtgttctttacctcctgatcctcctgcctccaccacctcagtgctgggattataggcttggcccaccaagcctggcttataccatgctggggatggaacccagggcgtcacggatgccaggcaagcgctttacccaccgagccacatcccagtgccagtaaaattctttttagtacaaagctttttagtacaaagctctctctctctctagctctctctctctctctctctttctttatgtgtgtgtgggggaaatgtttgtatgtactgctgggacttgaacttgggaccttgtgcaggcctgacaaaccgtctaccatgaagttaattaaatctccagcccagttctccttttgaggactatctaggtgatttataattcccatcctaattacttctctgtccccaccagccagtttgtaaacttcactctgtggtcagcttggcctaccatttctttacatctctattgtcttgcttctacctgaaggtcacagaaccacacagcgcacccttgggattcatccccgtagttctgtagttctgttaatctatagctgctacagtgtgttccactgcataccatggtgctacactttgttaacccatccccctgttcagatgtggctgggttggtctgcttcctgtttgggtgattatgagttaatactaatttcaggtcactatataaatataagtttctttcttgtctttttttttctttttggggtagtatttctgacagagcccaagcaaagcaagaaatctaccactgagccaccccccagcccctcactgggtgattctaggcaggggctctaccactgagccacaccccagcccctccctgggggattctaggcaggggctctaccactgagccacacccccagccctcactgagggattctaggcaggggctctaccactgagccacgcccccagcccctcactgggggagtctaggcaggggctctaccactgagccacaccccagcccctcactggggattctaggcaggggctctaccactgagccacaccccagcccctcactgggggagtctaggcaggggctctaccactgagccacacccccagccctcactgagggattctaggcaggggctctaccactgagccacaccccagccccttactgagggattctaggcaggagctctaccactgagccacaccccagcccctccctgggggattctaggcaggggctctaccactgagcgacacttttttacctttttaaatttttttgagacagctttttgttaagttactccgtctgacctcaaaatgttctgcttcagcctccaaaggaactgaggtcacaggcctctgcgaccaggcctggctgcaatacaaattttgtttgggggtacaaatatcttgaaatgtgaatgttgttgttgtgtatatggccatatgtataaaagtgtgtgtgtgtatgtatgtatgtatacatagagatcagagaaggatgccctattctgtcacactccaccttactcccttgagacagggtctctcactgaatctggagctcggctagcagccatcagttcgtctgccctggcagcactgggattaagggtgtaagtatagccacatccaacttttaaacccaggattcaaacccagatctttaggcttgcacagaaaacacttttcctttccatctcctaagatttatttatttattatatgtaagtacactgtcgctgtcttcagacacaccagaagagggcatcagatctcattatggatagttgtgagccaccatgtggtttctgggatttgaactcaggaccttcggaagagcagtcagtgctcttaaccactgagccatctctccagccctacaaagctgctttcaaagtggttctgcctctgtgcattgcatcagcaccatgggaaagttccagttgttccccattttcatcacccatgagtgatgtcagttctgggattcggaaagcagtgtgcagagctgtgtagcaatacccattgtgattttaattcgcttcctaatgatcttaagcatcttcaatactttctgtttagattccatttactttttattttatgtatacgagtgttttgtctctatgtatgtctgtgcaccctgtgcatgcagtgcctgaggaggccagaagagggcttcggatcccctgagaccagagtttgagatgggtctgggagccatgtgtgtgctggggaatcacactcagtcatctgggaaagcagttagtgctctaatcactgagccctctctccagcccacaatctttttgtatgattttttttttaaatgattgtagctatgtctagtgtgtgctcctgtgtgcacacacattgtagcacacatgtggggcccggaggaccagtttttcaggagttgattccttccttctaccctgagaaggaaggttgttctctcatttctgccgcttcctggctggtctgcaagttgctggccagctttcctgtctctgcctcccgtcttactaggaactctgggattaaaagacacactacatcacatcaacctttttaatgtggcccctagggatccaactcaggtggccgagtgcttttaccagctgagccacctctctagctaccttgaatgcttgcttcttacccagatatcttcctcaagacatgcctgttcatatcctttgatgggtttttgtttttgttttctgtttggtttttgttttaaatggatggtttctctagctatttactatgcctttgacccagcctcaaacatctccctgggctgggatgtagctcagtgggtagagtgcttgcttagcatacactaaggcccctggttccagccctagcaccttgtaaactgggtgtggtgctgcatgcctgtaatgccgaccccccccccccccaggactggagtcaggaggatcgaaagctcaggggccttcttggctatatagtgagtatgaaaccagcctggggtatatgatattctgtctcaaaggtgcaaaaataaataaataaaataaaataataaaataaaataaaataaaaccatccggcccttagtatgggttccttgtggctggctctttggctggagtcacgtctgcttcttttggatcctgctgtgagctctgacagtttctctgaaggtaggtgcagggcactgtatggcctcttttattggcggcgggctttttctcttttcttttgtagagtgcaagctttgtgagacagcttaagcaggtcctctggacctgaagggatggagagaagaattcagcttcccacattttcattgttcaagggctctttttcaaaccggctcttttcttgcctctctctggtagctgtcaatatagccaatgaattactgtttaaggaaaaaggaattgaatagatgtctagacttgccaaggtcagggtgagctggctctgcagctcttgatatcattactataccatttcttccttcttggcagagaaagaggagaagagaaggaaggaaggagagaaggaaggaaggagagaaggaaggaaggagggaaggaaggaaagaggaaggaaggaggttggaaggaagaaacatattttttgttctttcctgcgttagctcctgttgtttagactcagatcctaatcctaaactgttctgtgtaccagaccagactggatttgaacttttggccatcctcctgcctctgctttccaaataccagggtggcagacatacgtcaccacatctagttcccaaatccttccaggatccagtgtgcctctcctgtcctctgtagtcttgtctggttcagttatattgatgtaaagtatacatacagaaatatgttacattggccacttgtaagagcatttcagtggtactggatattcacactggaactagctccaagctttgcatctcaaggagctaaagctgagagtgacagcacaggacatccagtgtccttctctgacctcttcccataaactctggcagggcatacctctacacaccggtgtagacacatcaccctcccacacacacacataaacattttaagttcacattgttatgcaatatcaggcatagtggcctataattccagtaccagggaggctaaggcagaaggattgaccatgaatttttttgttttttgttttttcgagacagggtttctctgtatagccctggctgtcctggaactcactttgtagaccaggctgtcctcaaactcagaaatctgcctgcctctgcctcccaagtgctgggattaaaggtacgtgccaccactgcctggctggatttaccatgaatttaaggccagcttggctataatagtatagcctgtgctacagtgtaagactctgtcttagggagagccagatagcaagcaagcaacaacaaaaaccactatgcagccaccatcaccgtccatctctagaaccttctagccttctaaactgaagttctgtccccaccgaaacactattcccttggccatcactgctctttgggcctcacataagtgggactagaggagctggggatgtggctcagttggcagagtgcttgcctagcatgcatgaggccctgggttcagtccccagctctctataaactaggttctgtgatgcatgcctgcaatcttagcacccagaagtagatgcggaggtttcaggacatcctcagatgcatagtgagatccgggccagcctgggctacataagactctgttctgtccagtttggcttattttgttcattcttgttgcagcaggtatcagattttctttccttttccaagctgactagtattcctatagctgtatgtacaatgtgtgtaggttcttgagtccacacttgtgctattgtgagggaaaccaccatgaacatgggtatggagagatctcctgcaccccttactttcagctcttttggatatgtccagaaatagcattctgggtcctatggtaatactacatcaatgttttcatatatgtgtgtatgtatacatctgcatgtatgaacatgtgtgcgtgtgttcacacgcatgtgaggacaagaggacaacctcaggagtcacccttaggcatgacatccacctccactgagacagtctctctattgggctagactggccaacaagtcctgggaatcctcctgtctccaccattccagcgctggtattacaagcgcatgccaccccatgggcctttttctttctgcagggttctagggattaaacttgggtcttcacagcaagcagttcaaagactgggctgtctccccactactgtgttgttggtggcagggttgcactatgtaacttgggctgaccttatacacctgggagattctcctgcccctgattactgaacaatggggtcacaggtgtgtgccaccaacttgtcttatgttgaattttaaaaaagtgtgtatgtgtgtcatatttctgagactcccccatctttgtccttaagactgctttacctggtctagtagcttcaaatctaccatccacggtcactctgacccctgatgtagccaagctccatggcaccctgggtgactccactacaagcacatgggtgtacttctcatggctttggggttccacacagatccacaagagtccaccatggtcttttgcttatctagctccgatgacttggttcctcttcaccatctcagtagcctcttgtccatccctcccagacacagaccttccagtgctaggcatgcacatcccttggctggaagctgccctcccacacttggccgtcagccccaacctgtgccagctcaccctctgcacttgggttcaagtatcctcacttggggaagataccgcctacctactgccacttcccacagccaagtcaggttcttttgccaccgtttttcagagagtgcgtgcctgagccaggtctggtgactcagaaatataatctcatccggctaccatgtaggctgaggcaggatggtctcaggtttaaggtttgtctggcttgcagcataagaataaggccagtctggagaactaggggaaacctgtctgcaaatggaaaatactaaaagtgctgacaggctgataagatgccttagtgcagggctggagagatggttcagcggttaagagcactgactgctcttccagaggtcctgagttcaattcccagcaaccacatggtgcctcacaaccatctgttatgggatctgatgccttcttctggtgtatctcaagacaattacagtgtactcacatatataaaataaataaatcgtttaacaacaacaacaacaacaaaagatgcctttgtgggtaaaggtgcttgccactaaaataggactgaagtcttacttcccaggccccaaatggtggaaggagagttgccctctgacctctacataataaataaaatgtaataatattttaaagaggtggagcaattgagcacacaggaccttggactcaactgtagtactgaagaatgagaaggaacacgggagtggggcatggcatggtggctcacattgttaattctagcatttgaacatggagccaggattataaattcaaccttagctatacagtaagttggaggccagcctaggctacaagaggcctgatctcaaacacatcgcacagaccaagccaaaagaaaaccaatcctaaatttaaaaaaaagcttctgcccccacctctcaaacacacttatttagacagcacgacacgtgagaaaatgattctcaacctatgggtcacgacctcacagagaaattgtttatcagacatccggcatatcagatatttacaccataattcataagagcagcgacattacagttatgaagtagcaatggaaatcattttatggtgagaggtcaccacaacatgaagaactgtattaaagggtctcagcatgagaaaggttgaaatccacggctctatcaccgtgataggctttccagtttgggtccagaatggataggcaggggaagtgtgggattgtgagcagaccaaacctcccttctagcctcccccccccccccgccccaggacactatgccccccccccacacacacacacatgcactctgtcaacacgcatccagcatggccgtgagcattgcaatgatcactgtaggtctttaattcacgtgtgtatcatctttcgacatgaagctcactgagggcaagacctatgtctatctctattctcaatcattatttttagacattcttttgtgtgtgtatgtttgcacttgtgtttgtgtgtgcacgtgcgccggtgcatgcacaggcgtgaataactgtgtgctcctttagccctgttttattcgtgtttttgtttttgttttgaaacagtgtttccactatgaacgtggagctcactgattggctaggcaggctggccaatgagcttcagggatctatctgtcaaccttttacccaaagcgctgggaagatcgaagctctcaatgggttttgaagtcggtcccggggaatgaactttcctgtcttgggggatgagtgccatcaggcaatttaccaactgtgtcagctccttcagtcattattaaatgtgagaaatcgagtgtgtatgtgtgtgcatgcactcgcgcgctgcaggtcctgggggaagacttgggggaattagcatcccagtgcaggaccttaaattctcaagggattcacatggtgccaagttcaccatttaagtgttttcaactaccgtcaatcttcgggtgtccacagtccctagaaacaggcagaactgttcgccttaaaaggagcaaggggaaccagctgtggtggtgcacagctgtgactccagcaagaattgcggagcctgagccgggttggtcgtcagctagaagccaatctggtctacatacatagaccctgtctttaaaaaatgaatttttaaattgattttaaagggctaggcacacaccttaatagctacactcaggaagctggaacaggaagatcatgaatttgaggccagcctgatctaggtattcaaaaccaggctagccttggtatgagacaggatctcaaacaacaaaacaagaacaatcgagatggttcagtaaataaaggtgcttgtcaccaagcttgtcgacctcaatgccatcctcagaaccccacagggtaggagagaatagactgctgagagctgtcctctctgaccacacaaacacacgtgcgcgcgcgcgcgcacacacacacgtggtaaagaaccacaagtaaataaatgaatgaataaaatgtaatttgcaacattataccaaaccaaaaaaaaaaaaaaagcaaagcacagaaagagtagctgtgcagaaacgatcagtaaggagcagagaccatttcaagcatccctggactttaaactccagcctcaataggacacccctaaaaacgtgatgaatccaagcacccttcgggactggaggagggggctctgtgtctctctgcacccgcccacctcgagtggaagctgcgcgcgcagcgcgagggtcctgcggtgtcccggctccgctccaggccacgatccagcccgggtttccgcgcgcgccgccccgccccgccccgcgccgcctcggccgccaccggagccgctcggagctgcgcgaacatggccgaagtcggcgaggacagcggcgcccgcgccctgctggcgctgcgctcggctccctgcagccccgtgctatgcgccgnnnnnnnnnnnnnnnnnnnnnnnnnnnnnnnnnnnnnnnnnnnnnnnnnnnnnnnnnnnnnnnnnnnnnnnnnnnnnnnnnnnnnnnnnnnnnnnnnnnnnnnnnnnnnnnnnnnnnnnnnnnnnnnnnnnnnnnnnnnnnnnnnnnnnnnnnnnnnnnnnnncgtgcgccagagccccgggcctgccctggctcgcctggagggtcgggagttcgagttcctgatgcgacagcccagcgtcaccatcggccgcaactcgtcgcagggctcggtggacctaagcatgggcctgtcgagcttcatttcccggcgccacctgcagctcagcttccaggagcctcacttctatcttcgctgtctcggcaagaacggcgtcttcgtggacggggccttccagaggcgcggagcgcccgccctgcagctaccccaacagtgagtactgcgccaccctcgggtcacccctctccggacctggcctgaaccccctggccacccctgacctctaccccgcccagcttggctccttgtcactctgtgatctcgaccctgctcaacctgaaccccccgccccccggtcaccccctgaactcgcctccgcctggtctggcacctgggtcgagcctcaaatttcttaccgttcccaccgggtcccagcccttggtcactccctcctccatctcgaccctgccaggccctagcccctctaatctcgactctatccggctctgattccctagccatctcccagtcttgatcccacctagctctgacccctggttacacagatctccatcccacccggcccagctgagcctgatccttaagttactggtgatctcacccatcacctggctctgaccccgtggttgtcctgatcttaatcacgacccaactaaccctgactccccagttaactcattgggcactgatccctggatgggcccgactcccattcagcctgaaatcctgtcaccctgaccctggacaggcctgaacacttgggtccattctaacccctttctctctctctgactctgactctgactctgtctgtctgtctgtctgtctgtctctctctctctctcacacacacacacacacacacacacacttacacacacacacttgcacactccccaaccccatctgtcttccactcctcccatgttggagttggctacccatgatctccaaccctttctgaacccagcttatccctaatcccacctggcctcaatacctggggtcactcttgacccccatcctaccagccagaagccgttacccctgacttcccttaacctgaaggtcctagggccacccctaacccttatctcacacagcctaagtcttcagaggtcatctctgacttcgaatggtttgaaaccatcagctcaccctgatctccatctttactttgggtcaactccagaccctccagccctgaaacactccccttctccgtggtcacgccctgacctaaaccctggccagcatcatgagataccacccagcctgaactaacaccactcctccccagcccatcgccttcaaccctgattccatttatacagaacccccagggtcacatctgacctttgctagtctgaacaatgctaggtatgctcctgtctctgacgacacaggccaggacccagtgttcactgtgaggacggactgacagatgagctgtgcctctcccacctgggagggtgttacctgggaggtatacggtgcaggggtatatggtgcagaggtatatggtgagctgccttgagggcggggggcgggcaatccatactttaaaggcatgtctggaggcagaggctttaaagaggcaggacaggaagtgctgtgcctcagtttacctccagaacatggtaggaaacaggtctgtccttagcttggccagctcccaggacagcgccctatggcatttcagtaccatgcctaccttaccctcttccaagctcccattattcccagggccgtgtcacccttgagggtccagaaccttaagatccaaggtactaggagagagccatgttaattactttctccccgcagtttctttttctattcagtaattgcttctactgctcactagtgttcctttgacaaggttcacagtcaggtgtgtgtgtgtgtgtgtgtgtgtgtgtgtgtccaactcatcactcacatttataagcaccatcagtgtgcggtctttgctggggtcattcccaggtctggagtactgctgtctgtgtttgccttctcagggtccagacacatagttatagattctgtactgaataactttgaaccccaacagtgactcatcccattagggtgtgagagggaattcgaccttcatttcccagacctgaaagctgtgcccttgtgaagtgtacatagccagtgggagagcactcccgtagctcatgcaagactctgagttctgcccccaacaccaaaaggaataaaaaataaaataaaataaaataaaataaaataaaataaaagcagatttcttggaaggttagtaggtcattaaattcattcctgggcctgagaaatggacagactaccacactctctctctccccttcttaggggctctttcttgagactcaagttctggcaacatctcagtctgctatcctgttctcaatctccatttctcttctcagggttcttgtcccagccccttctgcttcattcttattgttgggggtggaggtacacatgcaggagccagaggaagaggccattgaggtcctgctctgagcagctcttcacctcattccctgaggaagagtctcagattgaacctggagctgggttggcagccaggaagccccagccatcctcctgtctccaccccctacagcactggggttacagcagcaggaaaccacacctggcttcttacctgggtgctgggcattcctgctgacatccgcctgccatgggcaagtgttcttactcacagatccatctccccagcctcactcactgccttttaaataaaaggctttcttttgcacagaattgtttctcccacccccacaccccacctcccttagacaaagtttcaaccctatatcattcccgcacgtgtcctgggtaggctaaggctggtatttttgaagtgatatctgtgtgtgcagtgcctggagatctgtgtcctaggagctggcacgtatagtgggtgcgtgtctgagcacggtggcttagctggcagggaagtgacttaccactgagccctgaagccctttggatgggtacagaatgccctgtgtgtgtgtgcgcacgcacatgcgagttgtgagttcccgtgtatatgtatgtgggcatgagtatgctgtgtgtgtatatacatgtgagcatgtgtatctgggtgtgcatatgagtgtctgtgtatgtttgtgcatgcatgtgtgtgcatgcacgagtgcgaggatgcacacatgttggggtcagggggtgacataccttcagcatgatctttatcatcctccatcctattttgtgagacaggacccttattgaccccggaacctgctggtttggctagactggctggctagcaagccctgtaaacctcctgcctcaactgttcagaactgaggttactggagtgcagcagggccccccagcttttgcttgcatgttgggcaccaaggtcgggcccttaggcttgctggcgcttgtccccggagcccgctctctggccctgaggcacactttcttcttttcagtttttatcttgaaatgaaaatttcattagtgacttggaaataatggcagtgttttctgttcctatctcttgttttgttagccagttttaacactaatatttaaggttataaggccaagtgtgggggtgcataccatagcggcagattcaaccattgcattacagctttgttgacttaactactgctcgatttcagtgcgctccagtagctccacgcttggcagttttgtcccctgtggacacccacactgattcccaaagcagccctgatcctcagctgccttctccctccccctcaggatagctgacagtgacggccatctctatgggtgaatttgcacacaccacactctcctaggcgcctcccacacaggagcaaaaccagaatctagctccaattgttgctagaagcatatcttttcaaaccttcagtgctttcaattgctggtgacagggaaagtgtctcctgttgtgtttgatccttgggtggagaaacacccagagctgccaggtactcaggcagagggagtatgcctctgtggtactgaggttcaagggttcaagcctagggctttgcatgtgctaaataataagtaagcacagagccacatgccctcagcccctcactgggggattctagacaggagctctaccactgagccacacccaactcctcactgggggactctaggcaggggctctaccactgagtcacaccccagcccctcactgggggattctaggcagggcctctaccactgagccacaccttccagtcctcttttcactttttattttatgacagtttcttactaggttgtccaggcaggctttgaactttgaatttcctgcctatttttgcagagtatctgggatgataggcatgcatcgccaggtcctatttgtgttttgagtttgattcagcctcttccttgggtgagcttcagtgtgtgtgtatctgtctgtctgtctatgttggtgatgatgtctgtctgcttctttttactatttactttggaattgattgataaacttgacagatgcccttgctgccacagcagagtgcttggtctggagtcctctgcttaggctcatgaagggatcagattttctccccagttctgaagaaacaaaaagtaaaaccacacacactgggtactgaacctcagcccctggaatccacggttgctgtcttacagccaccccgtaccttcctcccctgttctgcttaatctagaagccaatcacaggcgtggagccgccctcggaagataaggatcacttaagagaaaggtcaccaccgtggctcgcctcacctaagaaatccacagtgggttctcctgctggcagcacccactcagctccactgccccatgaaggtctcaccctggagtgactagaatcaaagtcataggctgtctgtctgtcttctgtctcttgtgtgcatgtgagtccttgtgtctgtatatggggcacatgtgcacacgtgtatgagtaagggggacaggtcacctttggctgtcgttccttaggagcgtcctcctcgtcttcgtcctcgttctcaccctcgtcctcctcatctttttctttttggacagggtctctcacagaccctggaacctggagctcatcagtcaggctagcctgacttttgggtccgaggggccgtcctctctctgtactgagatcacaaggccaccctggtttttaccaagtctttccggaccgaccgaactcaggtcctcatgtttatacagtaagcagtgtccccactaagccacgcccctccctagccctggaggattcctatccaaccttccatgcgtctccctctcgctcagctcgctgagtgatgtgtttgaaggaacagggtcatttgtccccagaagtttccacaactcctcataagactgaattctagacacaggcagaccttcactttatcgtacctgcgagtgggtgttgaccccagagattggatcaaatttcagtttgatttttatcttttctttctggtcagaactgcctcttcactggtgtttggtgtgactatcgggagacaaaactgtctttatcagattagattctgtgtgcaccgggaagcaagtctgtgagatcatactcagatcctcacgcttgcttggctgtcccacccccaccccacactcctttattctggcaagccctgaactcaccatatgactcagttaggctgacttcaaactcctgatcctcctgccccaacctcccagtactgcggtgacaggcaggtggcatcctgtcagcagctcttggcattagttaggagttagctgagctgctcgcgtcctcacaaggaccctcatgtgtctttggctaccattgtagggttgtcagggactttgcctcagggagaagggtggcagtcaccgatcacagtgattatagactcaaatcccgataaaatataaccatatgtcatggtggctttgctacctaaggaatcgcttcagatctatgaaaagatacttgacagctctttgccatttccagctggtcagttgactgtagccaatcagtaattaagccattgagcaactagttagcagctggacgtgttgaaatccgtttgaaaaggccggactccatgaagacaaacagttcctcggacttctcctcattgcatggcatcaccagggctgaccacagcatccccctttgcctgcatccccctaccctggtgccccccatactttccagggggctgctgggtggggtcagattggtcagcacaaagcatcattttgcctgttgctataggagagggtgtctactcagactctttccaagagtcaaagctggaccatgtggggactggggttttgtttatccgggtctgtctggaggcagtctggcatcatggagaaggaaggacactaggagggcagcagaagccagctacctgggagaggggaatggtcccactggtcctaggggaagtcccactggagtggggaagagccacgggggtggtgtgggtgacttgggtttggtggaggagggctggagtgcagcgtgcttggagctggggagggagagctattgcctgggcaatcctggggtcaggacttgcaatacagtccccttctagggaagggcttccttccgtttgttgggaggcacctgcggctgggtgtcaggcttgtccgttctgctacactgtggtctggttacgaagttccttccagaaggtctgcgggggcctaggtctgcagcacaatcaaagccctacctccctgtcaggactgcataaaccaggtgtgatggtgcacacccgcaatctagtgcggagaggccggatcaggagttcacggccggcctcagctacatagtgagcgcaaggccagctgggttacaggagaccctgtctccaaaaaaccaaaacgaaaaagtttgcagggatgtagttcattgggagctggcacaacgaatccgtgctaaaaccgtaatccgctcagtttgcactgaagacgctaggcgatcgcctagggaacaggagttgtataaatccttttctgataagatggggtctcatgtagcccaggctggcctccagttcctttgtagccgaggatgactttgcagtgatccttcacctccctactgctgggatcccagatgcacaccaccacagccaacagttcatagctgtccgtctgtctgtctatataacttatatagtaattatatagtatagaattttcaccgttggtccataggaaagacgatgttggtcatgtaatgcgacgtaactgagtttgtactgagcatacagaagctttgtgagcagatatagaccacgtggagacataatgggggtcttatttgatgtttttggaaaagactgggctctgttttaaaaagcagaaacgaaagcaaaggaggtggggtttggagacccgaatgtcgtatttgttgtttttgcatcttgtgaatgtcgggaggataaacttgctaaattaatgacactcaaattgcagccatgcctcatttccataattaccctacacttaaggcatttcatattaaaatgagaggattataggaaaaaagtgcttttactttggtttcctggaaatgggccctgttaccactggcttggagatcctgtagtcattttaaagcattgtttctcctaagtttctagcttcctggttaaacgttgccagccaatgagagagagagagagagagagagagagagagacagacagacagacagacagacacacagacagtcagacagagacaccctgtgagcgcatccgtggctacatagcaagtttgaaggtgacacaagctacgggagaccttgtctcaaacaaacaaacagaagacctaggagttctaggaacacataccacatcccccagccccaccaaaccaaaaacttggatttggccagatgtggtagaacatggtgattgcctgatcgcttgggcagttggaggaggaggaccttgagttgtgtactagtggctcagcctggactgcatagaccagcctgtctcaatgaagcctccaattcagagtgagacccgttgtgctgtttgaattgtgttgtcagttttgggtcttttaaatcttattttatttattattattgtatgtgtgtgagcatatgtgtgtgtgtgtttgtgtgagtgtgtgtgtgtatttgtgtgggtgtgtgtgtttgcacaagcatgtgtgtaaagggtgcatgccacaacacatgtgtggaggtcagaggacagtgtccagggatcctgtgtttccttccaccctgactcctgcaagagagctcaggccaatagacttgcaaggtgaccgtggtttttgtttttgttttaacctccagagccatcgtaacagtgcagccactgcagttttattgtgagcctcctgagcggctaacatatgtaagccagcgagactcacagcttgctttggctttcagtctgctgcagggtgtgagaaagattcggccacacagcactgtagctggaaatgaggggcttgccggatagttggatagtcggatagttgtgcccgcccccggcttttatctctcaccaggcaggacttgaccagcagcttcttcagggttcatctcaatgcaggacctgagccaaagccgtgggccagtggtcagtgcctgcatcaccccaccatagctcatgttgggaatcactccttcaaccccacttgtggttttataacaccatgcgttcattccccagagtgatggcagacctcatctggactgaataaagaaaaggttattttgccctaggttccttgcataaatttagtctctgtgaggctaataagacatgatttttttaaatgtcaatcttaataggaacaagccctttgatatgcacagcttttgttattctttctgagatgggctcctgttacctgagctggcctcaaactcattaggtaattaagcctgccctgggggctgaggatgtggctcagtgggtgagtctgtgcctagaatcccccagtgaggggctgggggtgtggctcagtggtagagcccctgcctagaatcccccagtgaggggctgggggggtataacctagtgtccctgcctactatatagaagatgctggatttggtcttcagcactgaattccttgtgtctagctggagctgtgtgcagtcttctctgtggtcctgcaaggtacctgtgacagacactgactacagttgcctccaggtcctgggcagcagataaaccagatgtataggcaacatagggtaccaggacaagaaagctcttttgggagtgtcacctccatcatgtaacaggcaatggtggtgtgacacagaggagtctcattgtgttaccaagaagtcttagctggaaggcagtgattcaaagtcacttgtgaacttagcagctctttggacctcaaagtgaagcaggatcaggctggaagccacctgccagccccgccactgccaccgaggttgcagaaaaggaaaccctgcagaagccagggaactcctcttttttccctgggaagttcagatccagtctgcctcacagctagggtcctcctttgagaatgaacctgggctgggccaccgggcggtggtggcggcggtggtggcgcatgcctttaatcccagcacttgggaggcagaggcaggtggatttctgagtttgaggccaacctggtctacaaagtgagttccaggacagccagggatacacagagaaaccctgtcttgaaaaaccaaaccaaaccaaccccccccccaaaaaaaaaggagagagagagagagagagagagagagagagagagagagagagaatatgaaactggaagcaagtatccttcccccagaaatgtccaggagtatccagccgcctctggttgcagccccgtcagccaagaacgtggctccctggtttggttccagcacatagaccatggatcaaggctcagcttccctttctgagtgtttttttctatatagatatattttccctggttcgcctacccttagactgactagccagggatgccgtggagaatctagaactttctccagcttcattgagctacagtaggcgttttgtgtgtttttgtttgttctttatgttttctgttcagcttttcaagcagcctcagatacaggcagtgccctagtgtccttgagagccacaggttcccaggctgctgagcacagccttagtttatcctgtcacaacagagggttttttcacgtgaagatccttctgtcttcagctcccatttccccaaaggagcctggagttagatgccttctgtccatgtctggctttatgtgggttctggggattcgaactcagatcctcacacttgtatgacagtcactttacccaccaagtcatctctctagccaggaactgtttttgataatgacgttcatcctgggcatctcaatccatttgagtccagctcctcagcacctcatctttgcagatggtaaaattctttgataggtaggaggctgttgtgtgtcttcctgttcttgtcagccttccatgccgggtgtattcacataacaggctgttggtggtgttggggtggtgtgcttactttttaggtaggttctctccattcagaccaggctggccttgaactcataatcctcctctcagccttccaagtgctgggttataggtatgtaccaccatgcccagatgccggatgagctttcttggtgcccttgcttttagccctgccatgggcaggtgagtaggtgctgggatgagaactggctgttgccagagtctctcgaggttagaggcttgctgcctctggagatggagccagccccagattgccctatgcacttcagcagaagctgcatcgctggtggctgacagggaagagaatggccaggggcagccgagctcacttccactcacggctgtgagcagagcttggcctctcgggaagggcagcatgcccaaacagagacagcagctcactggctgtggctgagcaactggccagtctgtctgagaccaggggaaccagctgcagcctgcaggccaaagcctgccagctgcctatgtttgtaaataaagttttaaggacaggcatggtagtgccttcctgtaatcctagtacttggaaagctaaagtaggaggatgtgaatttgaggctagcctgggttacagagtgagaccacccccttctccccgcctctttaagacagacagtgttatccttgcacactacctataactttctggattggctaaggttgcttaactgagatggcctgtgtggcctaagagacagcttttaggctctgctcctggccccacccccagctactcctgactccacctctggcaccaatcatttcccctccagccaggacattttactgagactaaaaaacctggaagtgccagctttctttatgcactgcttccaattctcttgtctcacttatatccaaatttagtttagttagcaggagtgtgtgtgtgtgtgtgtgtgtgtgtgtgtgtgtgtgagagagagagagagagagagagacagacagacagacagacagacagaaagacagactattcattcatttatttgtagtgctaaggattggacctcaggacctttcgaaccttagccaggagacatacaaccaaagggcccctcttgtgctccgggaatatcgggcctacagcactggacttggctaagtgttgtacttactgtcacatccttcggtgcctgtcacccacaacagatcttcagccttttaatttttaatctttcttgaccatgacaaaacagaaagcaaaacaaaatttaaaaaaccaagccagatattttataggattgcccaataaacgcagtttcagttttttactaagtggataaaagggctgattagagtcaggcttagaatctttggctaggaaggaaagggccacacaccttctccggatgtggctgatagccctggagtccgtttctgactgcaggaatgctctgctttctaccaggtagttactgtgtcttcttttgtagttaataagtgatgcttgagccttaacccagtgcaggatagtttgtatctgtctagtctcatttacttgcttctagtaacagttttacaaccccctgcatgtgtttcctagtctttatctgcaaacaatgatacttttgtttctttcttccactgtttctttccttgttctggttggataggctggagctccgaaatccctttgggtaaagagcctaggctaagggactcctttctctcagccagcgcagtaagaggaatccatggagacattccacagcaaatgcagatttcacggctgcagatctgcttcctgggctggggagagaaggcttagtggataacggcacttactgcacccgacaacacccaggttcaaagcccctgaacccatgtaagaaagttggatgcaatagaaggtctgtaaccccagcagagctctcagcacaggagagtatgcagaacagcacccaaaggtatccattaccacgtgtctgtctctttctgtgattccctcttcaccaactacaaacactcacactggctcagccagtgcagccctcagcagagagcagaatgggtctttctgattcggggtcacagtggtggtaaagtgttagtagcccaccatgtgtccaggagccactggagggcttggcctgggggtggagtggggggggaatgtggctgggtttggtttccttaagcttttttgtttttgttgttttatatgtaattaattaattaattaattaattaactcttgtgggggtggagcaagtgttcggaagtcaggggacagcttgctggtgtcagttctctccttccactgtgtgagacccaggattcagtgttggcagcaggcatctttacccacacagtcataaaaacgttttaattgtgtgtgtgtgtgcgcgtgtgcatgcgcgcgtgtgcgtgcgtgcccccaccctatacctgggattataagaagtgccaccatactttgaaggaagacagtgtcccagcctctggcgtccaccctctgtgcttctgggtttatggggaggagttgttgagggaggtcagcaaacttgctgcttgacatttaaaaccaactttcaggctttctgcctctgtccatggagatgccatgtggagaactggggtctccaggagatgtgatactggaagactggagcaagttagagggcttgaaagacaggaaatggtgatcttctgggctgggatgcccaggtacccactttgtacaggaccaccttgggaggtggggacaggtgctaagggacaggagggtcctcagctagagtgaacatttgggggaactaggggtggacactggtaggcagtctctggctagggtttttcataccagtattatgaatagaatccagagccttttaatgggggggaggggcgggggtctaggccagttctgtactcctgagccacacctccagcctttcactgggggtggagggctctaggcaaaggttctacctagggcccatgctcccagcccttttactattttgagataggattttattaagttgcccaaactggccttgaactcctggtcctcatccctcaggctcctctaagtagccctgcaggcttctggagctgtttttattgcagagcaaaccatccggactaatgggccatcagggataaatcacaggaccaaggatgcgatttacataacggttaaaccagtttagtgtatcccgagaagggagccagctcctccccaagcgattattcagcgttattaatctgctttatggcccagtttccccaaatgggtaattgctccttcaaagtattaaaatttatttagaaacctaggtacatgcaggagagggaaatggcctgacagctcttgaaaaaaaaagttcttttttctgctacagggtttcatttggcccaagctaacctccaactcacaatcctcctgcctcagcctcccacacagagtaccattcccagctgggtatccatttattccttgtgccttttctttccagtgtgtctttcctgattcttcttttctttcaaaataaagaaagctattttattttattttattttttatgttttatttacttaattgtctgaggaggggataggcatcatgattggggtatggagatcaggacagctttggggagtcacgtgggtccgttcactctaccggctgagccatctcactcacctcagatctttctaggccacgtgggccccgagtggcatcctgtcttactaagattgcagagctgtggcttggtgctggttctcaggctcgggcctcttctaaatttgggtacagggagactaggagagccaagcagtcccctgtggggccagctgtccttccgaggagtgtgctgtaagagaggagggttaaaccaaataaaggctcttgcaaattcctcccgatgataagaggcgcctttgttttgtttgggttcttatctgggccggcttagaggtctctaagctggagtctccgctgttttgtaaacatctctaacccctgctcttctccctctggagaactagaggcttcctctgcctttgatcagatcttatcaatggctgctggtgtgagccgtctgcccggaaggcagaatagacctgaagaaagaagctcccttggggaaaggcctggttaaaatgactgactctaaatctaggtttcacagggcaggcctggtggacagatctacaatccctaccaccaccacctccctgcactggggaggtggaagagtgtcacagacctgagactagcctgggctacgtaataactctaaggccagcctgtagctacatagtaagactgtctcataacacaaaaaaaagaaaaagcagcaaatgtttagaagtctttgtttcctagtagaaggagttaggagactacagttctgagatgtgtcaagggctgtggttgactgctgacctgggactgaagctgtagtttctctgcgagcctaaggtcttcaggtctgtccgtctgtctgtctgttcataaacaccctgaatctaatttcaagttctctttcagtgggtccttgagttagggatttaatttttttaaaaaaacattccatttgtttattgtgtgtttgtgcacttgggcagcacatatgtagcagtcagaggacaacatgtgggagtctgttctcttcttctgccctctgggtgctggtgatggaattcaggtgacaggaaccttagccaccaaaccatattgctgcctctccttcagagaaatgagcaccaccagggccctgctgggtgtgcttggtgctgtggcagatgcacccaccatgctcctagaaggaggaaatggaggggccacgcatggcagagctgcttggctgcccagtgggaggttccaggtcactgcacacacaggttaaggccacttttgatagacactggaccatggaggcgccctagcgcctgcatgtgacatcacagcaggtctacagcttgggtttctttctctgtatctggtacttgtgggacagttgctctttttctggctctgtgtaactcttggtttgtttgttttcatcattcattcattcactcattcattcatccatcatgtgttgagtggtgggggtgggtgcatgtgtcagatgtcaggaaagctttcaggagttagttctgtccttctgccatgtagactaggccattgaactcaggctgtcaggctgggtggggagcaactttccccactgggccttctcatcagtcctcctctccccttattttgggatctggcctcagactgactatgttagccttaggataaccttgaaattaaccctcctgcctccacctctcaaatgctggtatcacaggtttgatccaccatgctcaatttgtacagtgctgtggagtaatgtagggggagggaggcttgacaggagatatgtgggacccagggctgggtgcacctgatgatctgcatccaggcccaacttggaaaaacagtaagattggcttctgagtctccgggatcgttgctgccatgttgagagcgttctggtctctgcccagagccagctgccctttcacttggctctttgtcaggttggggacttcgcactgtttatagacccacaagcgccttcagatccattgatgattaagccctgtacaaacagccggggtcaccgacagccctgctgcaggtctgggagggtggctccttcctttctgttgtgtttattccaagtggatgagagatgctctttggagacaggcctgcaggcatacgccttcaccccagcactcagagggccgaggcaggatagtcacaggcacaataccaccctgtctgcagtgaggcccagcctcggaaaacaaaacccagcgctgttggatggacctgagttggtggagtgcatgcctagcgtggccagtgaaccccaagggtcccccgtctctgtctccagcaccaggattacagacacgtactgccacacttggctttggatttggatgccgaggaccagaactctggtcctaatgcctgtgtgctgagcattttgcctgctatgcgttatcccagctaccctccccctcccctagtgacagaggaaagtgaccatcatacagttaatttcgtaactttaaagtaatgaaaactgagttcctttttgtctgacttcactgtgtgtggtatatgtgtacatgtgtgtggacaggcacacaggagtgagtgtgagtatacaagtgtgtgccttcacagaggccagagaaggaccttgctaccctgctgtagcatctttggtcatatggctttgagatggtctctcactaggctggtggtcaggaaatccagtcatcctcctgcctctgcctcccacagcgctggggttccagccacgtgtgcatggccttgcccagcattttatgtgggtgcctaaaccaagctcaggtcttctggtttgcctagcaaactgtgagtcctaccgctgaccctacctccggcccctgtgggattttaaaaatacagttaattactttgttgaatgtttatggtttgtttggttggttttttgtttgtttgcttgcttgtttgtttgagacaaggtttctttgtgtagcctttgctgacctcaaactcagagatttgcctacttctgcctctgtgttgggattaaaggcatgagccaccatcacccaggctgttgtgcattttatatggtagggatgtgcatatcatggtatggatggagattagaacacaacttcctcctcccaccatttgggacccgggaatcaaactcaggtcgtcaggtttggcagcaatcacctttgcccactgagccatccctctgtatttgagacaaagcctcattctgtagcccacactgccctagaagtcactaggtagcccagactgtcctcagattcactgtaatcctcctgtctcagcctcccagtgctgggattgactgcgtgcatgtctcaccatacccagtgaggggttgtttatgtgtagttatttctgttctgttgtgcacagggccccgggtgctgtatggaaaacctaagataaagaagaaccagagcggagagccaggcaccatggacactcctgtcctccatcctcccaggatctcacgaaggatgaggcaggaagccggcctgggctcgtcagtctttctccccatccccatccagcccccactcatcccattcacacacatggatgttagtgacaccaccagggtcactcagccacctggagaggcagtctcatggccgctggccttcttctgaagcttgctccttagtttattttattttatgtgcatgtgtgtctgtctgtgcactgtgttcatgcctggtgcctgtggaggccagaggagggtgtccaatcaccagagctgtcattacaggtggttgtgagctgtctgacctgggtaccaggagctgtactcaggctctcaagagcattgagcactcttaattgttgagatatcttccatccctctgccttttgggggaggactgggtctaccaagcctggcgctcacatgctcagctaggctggctagtcagtaagtcccaggaaccctcctgtctccagtgctgggattacaagcctgagccagcttcaccaggtttattttttgacaagagttctgagggcctggggtccttgtgctcacgtgactggtagaagtgtcttctagcagtgtgctttcgtctcgggaggtttttagttttatcatcatcatttgagggtgggggttcagaggacagctttctggagtcgattctctcctctcccgttgagttccaggtggccaggtttatatacaagtgttttgtatcccctaagccctcttgagggcccacattttgttctgaggtgaggccataccctggagcacagattggctgacagtctccagcctctgccctaggtgctgagattcaggccttcagctttcaccaggcagagctaccatgcagcagccggaacacttaccgactctgtcactcattcccacagtcctgcagtggtgcgtacagtacagatttttttttttttctcacttcatcctacttgccttccccagagaatcagattcccacttcctgcaagtctccctggatagccagtcattgccaacctcactcctgcaggaggtgtgagtgggtgaggaggtaggtggccttggggcgggtggggccaagccagccccttgtctgaaagtgacctggagtgtaggatggttaatcttggatgtcaatttagtggggtttagaagccctgaagggctggggctgggctcagttggtagagggcttgcctggaattcacagtcccttactatataaacctgggtatggctcacatcagtcatctcagcacttgagaggtggatcgggattttaccatcgttcttggctacatagagaattaaaggccagcctaggctatataaaaccctgagaaagtaaaacaaaacaaaacaaaacaaccacctaaaacaataggatcaccatggaaacagaccaggctagaacaagggagttcctccagtgggttgagtgacgggcagcgccattccttaggctccgagcgggatgtgagcagacccgagcggcagctttcattctctgcttctccagtggcttgatggaattggctggcatccacccagaggcaccttctaaagccacagattccggggacggcttggagttacctcccactgccatccttgcctgggtcgtttggggtttatccactcatgatcttctgtctgtaggtcagtcttttctgttgctgtggtcagttctggaaatgttttggccatcatttctttgattgcttttcactccctttctgttgtgcttcggtctgactgtgaatggcaggtccctgggttaagtccctggagtcccaaggctctcggcactcactttcagtttcttttcttcagtttcttcttcttttcctttttctttttttctcagtgttcatttatttcacaggtatataatacatgccatagatgtggagtcagaggacaacccaagggcattggctctctccttcccccggaggatttagggattaggctcagctcatgaggcctggcggaaagtatccttatgtactcagcgagcttgccagcctgttttgtgttttggtttttggtagtttggaaacccaagacctctcccatgctaggcgagcacccttaccactgagccacactcccaggtctcctctgggctgttgattctacttgatgtcgtatgttagattaccatacgttttgattataagattttccatcaggtcttctttatatcttccagttcttcactgagattttaaaaactgttttaaaaaattctatgcatatgagcgcataccttttctggtgccgtatctcagagatctgtagagttcacagtggctactctgaggtgggcctgggggagcgtgtactggcagcctctcttgtttttctgagttctctcttcctccttggaaggatgaagggtcgataactgaggcccaagactttggaccctattggatgttgtgtgccagcacctgcttcatcctgccacgtgctttccctggccttcattgctctgtgctggtctctgctccccagtctgtgctgttgatccaggggacagctccacctgtggcacgcctgggattccacagtcctcccccaaagccagaagacttcctgaaagctagacagacaccgagcactctgaagcttcctagctgagcaccttcccaacctgctggtgttctgggacagggctgtttgtttatagtcctaagaattggacccagggcctcctagatgccaggcaagccaaacccccggcccctcacgggccgatcctagcaaacactgctgctgtgggttgcacccctagcactcgtcacctttcattttgagagagggcagggtatcactaagactgctgaggctggcctttaacttgcattgtagcccaggcagaccgtcagctttctatcctcctgtatcaacttccggagtcactgggaaggaaaatgggcgtccaccccaggcctaacctgggctggtctgtgttgggatgggagaggtagagatatgtagcggcgaattagttaaaccgctttggctcccggcggctcacatgtgtgcacccacccaagagctctctggattctcaaataaaaaacacacaaatgccagctaactttgatatgccttgactagctcaatggctgggcacttctcaatctccccacagctagcagacattccctctggtattcctgagtaaacatcttttaaaatctatattccgtctccgttaccccagacccaactggggaaatggctgctagggcacgctctcagattcttacgtaccacttgcctttacgtttcatctttctccttccccatcatggtgattttcttgtgtctcctctctctcccggccccttgcccctgcaatctaaaagtcccgtctccatctttctgcccagccattggctatatggcaattctttattatcattcagagccagctggggctagggaccctcaaggtctggaagcacagctttttgggagccgaaataagacaaagcattagagccagtccccaacagagctggagcggcccacacaccagcagcagcagccggtccattgctgactgctatctctgtactctgcacaccggtgctttggccgctgctgtgaagtgtgcctgtgcctactgtgtgtgatgtactgtagagtgagtcggcttggttgtcactgctgccatagcaaatgccaatgctggacggcctcatcagaatctgccaggctccccgcttaaccctgaggaggcacaggttcccagctacctcctggcctgcttccagatgcacgccatggctagattataaggctctagtactagtttcagactttcagctgtcattaactgttaagcgacacaatggacttttcttaacaattaattcacatttgatgggatgaaacgagtgcaaccactgtggaaatcgatttggaaattcctttaaaaattagtacccagctagctcggtgctgggcgtacgtatacccagagaccttcgtactccatcatagagagatttgtaaccccacgtttattgcttctttgttcatgattgcaaagctctggaatcaacacagttgcccatcagtagatgactggataatgaaatttggtagacacacaaacactggaatactattctaccttcagaaaaataaaattaaagacattggtaggaaaatggatggacttagaatatagaccattaagcaaggccacagactttcagaaagaattccatgctctctgtcatgtgctgtatctcgtcagcatattcatatatgcaaattaacatacatgtgggtgcagtatgacaaggagaaaaaagaacaagaaaggctgagcataaggggacagggagggacaggatgacagtcctgggcggtggtcctgggcagaagcagtcagctgtcacacagtacttgggagttcatgttttcttttttccgatagggtctcatgtagcccaagctggccttgaacttgctgtgttgtcaaaggatgactttataaacatttggtcttcctgcgtccacctcccaaatgctgtggtcacaggtatacggacagctttcccctggcttttatgtgagcatttgctgtctgtgactcagtttccctcttttgaaacctggaacgtgatggaagctggttgctgctttccccctttccgaaagatacacttggtccttgcttttcaccgaggcaggaaatcaaagaaggatcttgggactggggaggtgttgcagtggggagctgtgtttgagtcctcggtatccatccagtgtaaaagctagacctggttgcacggacctgtacctcagccacgtgggcagttgaaacaagattgctggctgctagcatagctccaggttctctgagagaccctgtctcccgggaataagggagtgctgaagcaggacacccattatccccctcccatctcctgcacacatgtgtgcacacaccacgtacatgtatgtgcagatatacacacggacctcagaagctttggctcacccaagacaacaggtcctgtctctgctggtgtgcagcgaagggatgagattcgtttccatgaaatgaaactcacttccttattgttggtggccctccgccagcagggtgatgctgcctcccaggaatacggttgctctctctctttgcttcctggcctcgacttcttccgtgctgtggacttagccaactgtacctactgatgccagataggactaggtggggctgtaagagactgggagctgcccgtcacagccggccctgtcccacccacctgggttgcagctcctgggctgggctgggccaagtttgggctctgggtagtttgttaggtctggctggcctctccttattaggaaggcaagcttggttggcccagggctgcagagaggaagtgccctgggaggattgagttgggctctgccttgtttagaccaatggagctgctgtttgtgaaataacaaagccttgttgctctttagatgggacacagggagatagcaggagtctccagccaagtgctgtgtcttgcctgggatgctgaggtaagggctgaagccatcacatggctggcctgccacattactgttccaggaaacgctgctctcattccagacggacaggctcagccactggccgccctctgggctggttgtgtgtgaaagatgcctggccctttccgggaggcccttcctggctctgccttcagctcccgaaagggtttcctgagccaagttggatagctctcattggtcccagacctgtggaagtcgccagaatggagagattgagtagagagcctgtgtctggcctggctcctccatccagggtctcactgatactttgtcctggtcccctctctggtgacttggctttttctgcaatattctgaaatacgtgtttacccaggaaatacaaccgtgggcttcagagagcttttgtgtgtgttcacagcagatactacattcagataagagcagatactagtttttatagtgctagagattgaactggaggcttcacacatgctaaacaagctctgtgtcactggccagcctctccctccccgatatcttttgttttgagataagatctcactgtttgcacaggctgcccttaaactcaacagccggaagcccagacagcccttcaactgaccattctgctttttcagaatcccaaacactgggaatgacaagccttcaccatgaggcccaactacatactgatcttgaactattattattatatgaaattcaaagtttggataaagcacccttgattttgctaattgctctacaacacaatgcgcttgacttcattcataaggagtgctgagcactgaggcaaaggtcaggctctgcccatggctcatcgtccttgtgaggaagctgtgcttcagtgaggtgacattagctgagtgctttgttgtcacagggttctttgagccctcctgagacctggatctgagttgcagatctgcagggaagtagtgcacctgccaccgtgtagctggaaccaggttctctcagatgttacgtgagcccactaaacctttccatggtcattctaggttagcctggatctgtgtgtgtcagggccttgggttcgatacattataagtattacctgtgtgaagcccggcatggtggcacacagctttggtctctctcagcactagggaggcagaggcagaggcaggcaagtctctgggaatttgaggacagcctggtctagtgagttcctgggagatattatcagcccttgctttcagtcttcgtggttgttttgagctattgtctcaagcccaagctggcttctaactcacagcaaccctcctgcctcggctttctgagtgctgggatctcggtaggcatagaccaccatgccagcctttcaccttcagtgccaccgccacctctggcactttgtagacattcctgaaagtatctctctggaggagattccctttgtggcaaagggggtgcacccactcaaaaatgcacatgccagggctagccagttgcctgagtaacagttggtgttacttggtgtgatcacaaaccccaggaatgcagcacaagatacctcacaccagagctgaacttcaccacagtgacctgccagtgtgtgcacttttgaaatattgggctgacccctcccccactccatttctctttgtctctgactctctctctctgtgtgtgtgtgtgtgtgtgtgtgtgtgtgtgtgtgtgtgtgtgtgttttcttgggtgtgcgtgctacagcacacatgtggaggtcagaagccagttctttccttccactttatgtgatggttttaggaactgaactcaggtctccaggtttgttcagcaagcccttcactcgctaatgctttttttttttgcctgcctctggtcagcccggtgtggtttccagggagggctggcatatacttcttttactgtctcactgtagaagagccagctgctggccgatagcagtgaccctgtcccagagcctggacccaagagggctcttgctcctcccgatctgagactgcattgtcatcactcttaatgcataggtccctctggatttagtcttcctgaacccttccacgtcctgactcagcaccaggacaccatggtagccacggccacagcagccttggctcatctttcagttttctagcaaaatggattgttttctgtgtgatgtgtgttgtctgcacaagcatgaagtgtgcacatgcacatgtgtgtggacatgtgcagagactacaggtctacatcaggtatcctctgtgctctgtacattaagtgtttggagtcagggtcttttactgggacctgggatcctaggtgcgggctgccgtgcctggcttttctgtgtgtgctctggaggatctgaactcaggacctcatgcttgcacagcaaacactacccactgagccgcctcaccagcctcagctgaaagaagatactttaaatgaaatccctgagaattctttgctttgggacttggtacttaagcactgctacccatgggctgaggatttggcgtagttggtagcatgcttgccaacatgcctgaagccctcggttccaaccatgtgtcctataaccctctgcggaggtgcacacctaatctcagcactaagaaggtagaccaggtgtccaaggtcatccttgatacttagaattcaaggccagcctaggtttcatgaggctctgtcataataaaaaagccatttcctgatcgagcagtggttttccttggcacatacacaagacgaagtctctgcgcctctcacctcctgggaacaggcctcatgggaagggcactgcagcaagagtggaccatagaacataggaagtggagggagcttcctgtgtagtcacatgtccagccccctacagagcttgttcccctcctaatgaagcccttgggattcttccctcctgaagctgtccccccacagaactgggccaggccagtgctcactggctctaaaggcatgtggcaccacgcagaccgagagcgcttgtatccaagcacgcggcctctttcttccttccagtcatttgttccttaaaggaaaggctgttagagggcaggctgtagcagcagagaccgctgggaagcccacaccgaaggccgtgacacgcccctccctgtgattgtcttgtcatgagagtaattgaaatgacatttactagtctttaggagctcagtggcccaagacccaggaagggggcctcagctttcctaaagttttcattcaggtgagagagagagagagagagagacagagagagagagagacagagagagagagacagagagagagagagacagagagagagagagacagagagagagagagacagagacagacagagagagagagagacagagacagacagagagagagacagagtgtgtatgtgtgtgagtgtgtgtgtgagtgagtgtgtgtgtgtgttcacgcacacgagtggcctgaatgaattcacatagccaaggatgaccttgaacttgtgatcctcctgccctcccctcccctcagttctgggattcccagcatgcaccacacataccatgtactgcgaatgccctggcgaatgaacccagggttccagctctttttcaagcaaggtttgcctgacgtcagatcccagctctcattgtcttctgccctctatgtcatggcctatggcaaatagttctcatattgtcattttccttggtggggccgagcacttcctctcctggtctgagggctttcacacttacaagtccttcataagacattcattgtcccacctgctgggacgtgtcaggcatactctaaaatggcacggtgacatcattctagattttcccagccacctccctcccacaagggcttctctaaacatatggagttcttaaagcagtgtatattgtattgtttttaaatgatatttatttatttatttagtgtgtgcgcatgtgcctgtgtcacagggcatgaagaggtcagagaatatgctttgagaatgggttctctccttctccaccatgggttccaggaatcaaactcagattgtcaagcttggcagcaagcccctttatctactgagccatcttggcatcccctttgttggcttttgttttgttgagtttttgttttttgtttttttttttttttgagactgggtctcatgcagttgagggtgaccttgaacttttggcttttctgtgtctacctcccaagagctggaattacagttgcacaccacccctccgggtccaatttgtatttgaaggaaaatctggggttctgaaaaatccccagcaaggtggattttggtttagtttctgaggcctcatctgtcaatcactgattccttattaacctggacaggttcctgctgtgagaccttctcaggtggttacagaaaatttcatgtgtcaattgccacacttttcattattaaaaaaaaaagtaaggccaggcttggtggtgcacacctttaacccccagaactcgagaggcagaggagcagatcagcgagttctgggatagccatggctacacagagaaactttgtctcaataaaacaaaagttagaggcaggagagatggttcagtggttagcaccccaggctgctcgtcctgaggacctgggttcaattcccagcagttgtacagcagctctcagccagctgtcaccctggtcccagaggatatggtgctctcttctagcgtccagaggcaccaggcacaccagtgcacctagacgtgtgctcagccacaacacccacacacagaagatttttaaaaagcaagaaaataaaaagggaagcttacgttttgttttgttttctgagacagagttttactctgtaggccagcctgccctggaattctctctgtagtccaggttagccttgaactcactttgtagccctgatcctcctgcctcagcctcctgaataagggatactggcaggagtgtgccactcattcctgccgcaaagtctgtcctctggggtgttcacactgtggagtggggtgttcacactgtgcagtggggtgctcaagccactgctcgcttgggtggctcccctccaagtctgagccagtccccaccgtgggaggtcacagagtggcctccctgtctgtttccatccctcagcgatgcttgctgtgtactgtcccctgcagaccccagcttccccagctcactgtccactccgtgaagtcctggctctgcagggatggaggagagggtgtggggagcagcatgagaggagaggcctgttgtgtttatttgtgttaaacagcattgctagaagcccattagtgcacaactcggtattccattcttactctccaacggccagacacctcgctcccttggtggtggggcaggtctccagattcctccttctaagatgtaatgaaaatgacttagaagccaggctttggtctgaggctgactagggaggctgaagcaagaaaactgaataaagttcaaggtctgcccaggctgcagagaactggggctgtttgtgttttggtgtgtgtgtgtgtgtgtgtgtgtgtgtgtgtgtgtgtgtgtgnnnnnnnnnnnnnnnnnnnnnnnnnnnnnnnnnnnnnnnnnnnnnnnnnnnnnnnnnnnnnnnnnnnnnnnnnnnnnnnnnnnnnnnnnnnnnnncccctacttccactgtttggtcgtcacttcttagtgcctcgggtcatcgggcttcggtcttcccccccccacacacccacccccagcacaggaatgacagacatgctgcgatgtttggcttttatgtggggtctagagatttgaacttggttcttgtgcttgccgtgcaagcaagcgctcttccctctgagccacctccctagccccagcccaggctgtaatggtcaagccagctgtgtactgactgagctgagatctgacgctagaccatcagcgttctcacctcctgacaaaatcatccccagtcagcccgggctgctgcctgcagacagggcgggcctctgtgttcagcttatgagccttcaggcaagagctttggtataatttaccgccgaatagctagtcatttaggtctccccccttgagccactgactggtgctagaatagagtccttgttcgattccaagaagccacacccctcagcaaccagggcctatccccaacccagccaacccagtcaactgtgtgtgtgtgtgtgtgtgtgtgtgtgtccgtccgtccccttgtgccatagtgcgcgtttagaggtgggaggaagcctagaggagctggttctcctttcatcctgtgggattcaaggagcaagcggggtttggttttgatggtgatggtggtggttgttgtttgccctgtgagccatattgaagtgggactcctcagccgagaatcccagcagcaaagaggctgaggcaggaggattgctgtgagtctaaaaccagccccaactataagagagaccctatttttaaaaaaacaaacaaataaaaattaaataaagagaaaacccagaacagcaagatttccctctaggtgggagctgggttgagagcctgctttcatagaggcttccatgatggacagggctccctgcctgataggcttcctgacctcagcgcggtaggataggcactgagagtggaaggtcaggacagtggggcaccgtaacagctacccaaggctccaagccaggaactagatgtgttggcttatacctgtaaatcccaaaagactgcaacaggaggattgccgggatgtccaggccagttctacatagcaagaccttgtctcaaaaacaaacaacaagcagaagtaggtggacgaggcctctggacacgtggggatctttcaggagaggtgtgatgggaggcaccctgagtgccctggggagactctgccaagctacagggctgccaggcacttttctcactggctcctggtgacagggtggctgccttgggttgaattttgggaatgagtcaggagctgtttaggcaaataacctgaagatggttgtcaccaagtgttgctttagcttgcagtagggcgtggcgctgcagagggatgggcatggtatttaggagcacagcctcccttctcctcccctccccctcccctcctctcccttcctttcctggtgccagggatcaagtcagatgttgtctactgtggggacacatgatccccagcatcatggacggaggccagaggagggaaggtcagtttaccaaacatctccatcgacatcactcattcgtctcggggcttgttttacttggctgtactgctgctagaatctaatctgggccaacatgtccacagctgctctgcccccgaggaccactctggtggctcagtgaggggctctaccattgggctgtatctctagcttttagaatcttgattgttggggctagagaggtgacacagggattaaagagcatgtgctcctctgcaaaaagaccacagttccgttctcagcacccgtgacaggcagctcacagccgcctacaactctgcacctcggggactcgactgtctggtgtccatgagtatgcacacacacatacctcttttctctgtgtgtgtgtgtgtctctctctctctctttctctctcacacacatacttctctgtcaccgtctctctctgtgtctatgtctgtctgtctgtctgtctctctctctctctcacacacacacacacacacacacacacacacacacccttcttaaaagtcatggtttccactggcagcccttggagctggctgttgctcaatccctccagcttagttggtgaagagagagaaagatcgtagaggctcaagggtgctgccccgtgttctctggtgggttctgtctgcattggaagccccacttagagcttttgtctgtcagctgtacccagatagtgagccagggaaggcctcagaaactttccacctttccaggattaggcagcagttcttcaggcggagctcagcccagcccaggtccacaggctcattcttctcacatccacagcctgttctccaggatcctgtctgctgtgcactcaggcatccaccacagtgacaggctctgtctggtagctgtggtaattctaaagtgcaggctcttgctttgacttgaggatccttgcaccctcccagcagagggtggggtagcatccctgctccctgtctttagaaaggaaggaagaagcagaggagatctgttaccatgtcaaccttggtgcagaccttgggttgaccaggtgtgtcatgtgcacacatgcactgtgtgcgctgccctgttccttcagtgcaggcattctcaagttaccctcagccagctcagcttacccgccggcggcttccagtcaggccccttccttaggcactgagtttggacccccacagctgtcatcagacacgtgctagatggcttgtagacgcttgcttgcagacgtgtagagctgacagtgcacagacacaagaagtcatcttagaaaacgtgactgatgggttctcccagtccaaataccgatggaggagctggagtagacagcttggtgggtaaagtgctcgaggtacaagcactagggcctgggtttgatcttcagaatacacacacacacacacacacacacacacacacacacacacgccaggcataacggcatatacttgtaatcaaagcactggggggctagagtcagaaggaccccctagcctcactggcagccatcttagcctctaagcaagcctagctcctctaagctgaggtggggagtgcctgaggaatgacccccagggtgacgtctgccctccccacacgtgtataccgctacccccatgcatggacttgcacaaaccaaatgtctagaagtgttcctgggcctggctgtgagatgctaagtggggtagagatgacatcagatgcgtgctttagagtggggcttgctgtgtatcccgggctaccacggactcgtcctgtgccttacccgggcctcagattctttctcttcttttctcctttggtttcaagctgtgtatatttatgccatatgtgtgggagcacagagacaggcagaccctgagcttgccagccaggcagcctagctcagcatgagcctctggcccccgcatgcccacacttcatgcacacacacaagattagaaattagaaggtgtgctcagcaaatcatgcccatttcttagagatgggaaagatgcccaccttgtctcagcatatggtgtggtctttggaatgggaggggcttccctggctgctcagagtcagattagtctgtctgtctgtctgtctgcctgccactcaatagacataccaggctctaggcttgtaagccttgagtttagtgagaagccaattaaagaacacaacactcacacacacacatatgcatgcatatgtacactcatacatttgctggctctctctctctctctctctctctcacacacacacacacacacacacactccctgtctgtggagtatccctctacctttgtgaggtggcatctgtttatactttgaagaaattggcctttaaaatcttggcataagctggacatggtggtgtgtgccagtcatcccagcacccaggagacgagaatctcaaggctccaggcccatctggagcacacagtgagaccgtgtcttctaatgaattaatgaatgagggaaaaatgaatgaatgagtgaaatccacaaaaatggggcaggatgcttttagctgtttgccactggggtcaggaaccacagtcactgtcacctctgcaatcctggcacatggaaacgccgagagtgtgtcttggtggcacctgtctagagatatttatatcttttgctcacaggccaggcacagatgatgccagagttccaggagtaccattctgacactgacaggagcccccgaaagcttccgagtggtgcccctgccctgtgggtggtgggacttcagttcctgtgcccggtgactttgtacctgaccagccgatatcctccctttgcagatgcaccttccggttcccgagcacggccatcaagatccagttcacatcgctataccataaagaggaggccccagcatcgcccctgcggccactctacccacagatctccccactgaagatccacattccggagccggatctccggagcctcgtcagccccatcccttccccaaccggcaccatcaggtaagcaggctcttttgagtgcaccagggggctggagatggagctggactgggagataatcctgcaagggaaagtcacctttaagtcaccgcccatccaggttgcagatgtatgagttagggtctcctaaagcaaatagaataggtgtgtggcccagtcctgtaaacacagtgctccaaagcctgaagcaggaggatcgtcagtgtaccgccagccagggctacatgggcattcagggacatcctggcccctcagtgagagagaccttatctgcagagcacataggctgggacaagctcagttggtagagtgcttatgtgggccctgggttcacttcccaggacatcataaactgggcatggcagagtgtgcttatgatcttggaggcaggggaagagaggttatggtcatcttctgctatgtagtgagttcgaggccaagctaggctaccagagaccctgtctcaaaatagacagggtaggggatttggattctggccggtgtttttcgatgaagcaggattccctcttgctccctcacgtgtcgtgatgcttctgaaagtacggtgccacctgtcagggccgcagccgtggtacctctgagctctgtggcttcctccccgacttgtgacacaggccagccctgtacacgtggccgacgtggccggaactcttatgactgtaacaggagtggtacactccttgcggggcaggactgtgggaacccacaaaaccttgagagttcctctcagcaaagccagagttgtgctgtccctgagccctggccacgggtcactcctacaggtatcctcactcagtccccaaagttacgcctcctccttctccagggccatgcttgacgctagctttttatttaaaagctttcttatttttccagtgctaggaaccaaacccaggcttttacgcataataggtgtgctggctggttctgtgttaatagagtgtttctgtgttccagaggcaggcaagcttggtagtgtaagactcacccaggtggtatggttttgaaagcacgcaggggtcatggagagcagctgaggctgggcactgggagaggccccgagaggccattggtgaaggtgcagcctcagtggtagttgaaggcccaggactgcaggggtcatgcaaagaatctgaggcttgggggctggagagatgtctcaatggttttaagagcaccgactgctctcccagaggccctgagttcaattcccagcacccacatggtggctcacaaccatctgtaatagaatctgatgccctcttctggtgtgtctgaagacagctacactgtactcgtatacataaaataaataaataaatctttaaaaagaaaaaagaaaaagttgagacttggcaccaggaagagagcctatgagaggccgttggtgaaagtgcagcctagctgcagcgagagaccccagtggttttggagatgccagtgccttgggctgacacccaaggtcagcagccgcagtggggtcggcggcagccgcagcggagccagccagagcctaggagacaagctgtgtgctgcagagagcgggcagtcagagaggagcccagaagatagtgagtgagtggacccccaaagcaaacacccagttgtttacgctcttggagttgggctgtgctttgttctggttgtggctgtgccctggttcttcccttttgaagaaggtatttcatttcatttttatttttacaggagcccacagctgaaagactttgaactttctaaaagatattttggatttttagggagactggatattttaaagagactgaaatttgaatgtgtaaagttttgagtttgtaaagacagtggggcttttaaagttaattatgtttttaatgtgatatcttggggatgaataagaaaggaagggttgtggcttagtagtgatgtgtttgtgtgttaagtcaaggaatcagttgtactggctgggtttgtgtcgacttgacacacgctagagccaacagagaggaaggagcctctgttgaggaaatgcctccatgagattcagctgtaaggcattttctcaattagtgatagagtacattgtgggtggggctatccttgggctggtggtcctgggttctataggaaagcaggttgaggaagccctggggaacaaggtagtaagcagcgcccctccatggcttctgcatcagctcccgcctctaggatcctgccctcgttgagttcagtggtgaacagcaatatgaaagtgtacaccagatacacccccttttgcctgaacttgctttttggtcatggtgttttgtagtaccaatagtataaccttaactaagacgctaagactcttttctctgtctgtaatgagacaccatgaccaaggcaacttataaaatttaatttaattaggggcttgcttacagtctcagagggtgagtccatgactcctggttgaggggctggaagcaggcatggcactgggcggcaactagatgtgcaggcaggaggggcagatgggggacagctggacctgatgcgggctttgaagccttgaagcccatccctagtggcatactttgtaatccttcctgaacattccaccacctggggaccactaattccaatacatgacctgtctctaggagccattcttacttgaagcagcacactggcttagggactttgccactgaggcatatccacaacctcgcccccagctggttgctatggaagcttccggatgctcaagctggcctggaaccgttgggcctcctaccttggtcagctgggatcccagctgggcagccccacacttggctggagttggatccttttaaagtttatacataagggagatttttattctcagttctggaggttcaaggtcaggggatgacatctgaagatgtccttcctcctggtggaaaccaaagatggttaagagtatcagcagggataagtgtgagcacacactgcacttgaacacacatacgtgtgtgtatatgtgtatgggtcccttggtttgtcttggtgaacttattttgtttcctaccatgtaatgtctgtacacgggtcctttggagtccgtcctctttcctgacgctggcgacaggtacagcctgggaatctgcaagcccagagctgaggtggagagccagcccattgttgttctggacatgtggactgtgggttgtgtctcctgggtaggacacaccatagctgcttcccacagcagccgcccacatcttccaggctgtgaagcctgcagtgatggcaaaggccgcggaaggaaggcggtggtgagagttgacagccagcctgtgctcagcacccgccgcgtgtccttcagccattgatttcatcagagactgcttcttcccagcttcttttcagtctgggagcctccctgttcttaagacccacattccaaacgcatgagcatgtcttccaggtgctgaacttggacggggccccaggccggtccccttagaggtcagggcagtcagagcagtcgggaggccctgtgtgggcgacttgttctgatactgtttcttttgtaagctatattgatgtatgtatgtatgtatgtatgtatgtatgtatgtatttgttgggaggggcatgtgaaggtcagagaacagcctgtgggagtctttgctctccttcccaccagctcgactgcaagcacctttaccctcagggccgcccgagcccctgatttgctttttgagacggggtctcactgcagtgaggctggttcagaactcagtttgttacccaggcttgcctgaaacttgcagtaatcttcctgactcagcctcccagatgctgggattgcaggtgcaggtgtttgtttatataaaatgaatgattcagtcactgagagactgagggttcctcacaaagcccctcccaccagtggttcttgtcacctattgctggggctcctggcttcccaacagttaagaaagttgtagcctttctgttatttacatgggaaatcatgtggctttgagcaagcacacgacactcacatgagaaacaggtggggcagccctaaaagcatgttcagggccagcctgggctactgagtaggaccaaaatgagcctgggcaacaagtggtaccctgtcatcctgtaataagaagaggacctggatgagttcaggggtagacactttaggggcctgaaaggggccctaggttagcccggcatggcatggtggcacacacctgaaatcccagcacttgggagctgaggccagagggtcacatcaaggccagccggctacgttatttgttatagaaacaccaggactatatagtgaggcctcatctccaaacaaacaaacaaacaaacaaaggctcttggttcaatatccagtactaggtagggtacgtgattgtgggattgaatagtgtagttttttgtgttgtttgtttgtttttgagacaggatctcactttgtaactctggaattcactacataggctggcctcaattatcctgtgtgcgtctgcctccccagagctggggctaaaggcacaagcatgcctggcttcaacgtttctcattgacaatacaaagaaaaagtggtgcgtgctgggagtggggctggttggtggagcgctgcttgccaagaaagcctgcaagatcctgagcactgataacagcagacgcagtggcccatggcagccccagctctgggcaggtggaggctggaggatcaaaagccgtgtgtaataccccagctacatgagaccctgtctcaaaaacaaaacagcagccagctggctaagacactgagtgatcataggtcgggtgtagagtggcttttggtcaggtggcacagtggctgtaaagacctccccctctccccgaacccccgcccagcagttggtgctttggtgtccccagtgctcccttggagtcccgactttgtgtctgccacattcctggtactgctgggagggggcaggcccttggctcctcctgagttcccacgggtgcgtggtcactctgtccgcagtcgctgttgacagtggcttgggacttgctctggactccctgggcctttaagtgtcacaacaaaagatctctgttgacatccgtttatctccacactgaggaattccattgagcttttgtaaagctcagcggccggccgctggaggttcgcctgccaagactttctcagtttgagtttctgtgtaggggtggagcccacgtgtttacaaacacgccctgcccttcctctcccaggcagcgggagccagggtggggcaggcttggggaaagggtttgacttcccagcccgcagcagtgggccccgccctgctcagtctgcttgcctaatttggtgagctttgctagcgggtccctattggccgacctgggcaccgaaggcttggggacctcccagctgtggctcctccctccatggagcggatcccagggttcggtactttgcctcactccaccccnnnnnnnnnnnnnnnnnnnnnnnnnnnnnnnnnnnnnnnnnnnnnnnnnnnnnnnnnnnnnnnnnnnnnnnnnnnnccctgcctgcagggctccgcccagcagatgaatgagctctttgaaagaaactgcagcttcggcagtgttttgacctttctttctgtgaagagcaagtgatttaggaaaacagggagctggttaatcatttgctgaggctactgaggctaaagcaggctccgtgggactacacttcagcagactgccatagcagccatgaaagtagcctgtgggtcccagcaccaggcatttaccaggaatccctgcacccagggcgctgaggcaggaagattgcagatctgaggccagcctgtctggctgaaactgggaactcagggttcgcttctgttacagaccctgtcccaaaattaagatggaaaggctggtgggatggctcagtgagtaaaggaaggtgctccctcccgagcctgaagacctgagctcagtcccgaagccgcatggtggaggggagagctgagtccctaaagttgccgtcttccacacccaggctgtgcagtgccgtgcccgccccctgcatgtacacgtgtagcaaaggttagcagtggtgatgtgaatgaagggaagtcggcatcagagaactggcccccttagtcatggagctgtagtacagttctactttactgcgggctagggctagctcagtctcctgtgctctcggagatttgcgtttggagagcaccccagtctgcatcagaagtctagcaccccaccgagccccgcccctcccctccccaccccaacccactcccagccttagtttcacttgcttgtggtttcagttatgcacagtccaaaaataccaagtggaaaactgcagaaaatgagcaagttacaagtcttcaatcaagtgcagcgctgcatagctcctcccctgtgtgtgactccctgcccagtgtatctggtgggtggctggattacccagtctgcactgtgggctggggatgaagccccatggtagatcacttaacctggcatgcatcagtactgggagagggcggggagggtcaaattcaggcgtgccaaagaccagcagcacagcaagttctgccggtaagttacaggccacgctttatcgtggagtaggaacgtaggaacgtaggaagcgatggtgtgtgtcaggctctgtgctgtctaggacttcagggacacctggaggtctctgcatgcgtacctctggaaaaggagcctcctgaatgcttgtcttcctggcaaactttggtgcttccttcaggttgtgtaaccttcctgtgatcacattagaacttgaaggcggcatcgaatgttctaggcatctacggacactgagtctgctgtttcctgtccctgtctgcaccaacaggccttaccttgtttcctttcccatctgacaacttggtttctccccaccagcgggtttagggccctccgtgttcctttggcctgtccctgctgtttgtgtgtcatcctgcactgtctggggtgctgcaacattgggtttccagtcgagcttggtgggggccatcccagttctcctgggatcccagtggctgcatctgaggtgtgtgtccctgtgtagcaccacttgggctctgtctcatcagcctgcagggaacttttgtatggtcaccgtgtctgcactggacagcccttcctccccagatgtcgcaccggtgagaagtcttcgaaaaacatagacctggcctggcaaaggcctgagagcccagatccagtatcagacccccagatatagggcgatggctcccctctcctgccgtaagactgcctaaaggtagctgatattgggctgggctggtcagtggtgagaccaagttcagatctccagaacctatgcaaagatagcgtatagcccagctagctgagctgtcctctgacctgcacacatacatgcatacatacatatataattacatatacacacatcatatgcacacgatttttaaacgagtacctaatattagggtgttttccaccttgggtactttgtggtttcagaagcaaagttaatcttttgaaggagctccagggacttaagtaacatgacacttaccttagaagaacacattctttttgaaaacaaaaacaaaaaacaaaacaaaacaaaatccatgtatttattagtatgtatgtgcgcgcacacaccgtgctacacccttctaccacgcaggcaggttcagggaactgaacttgcattgtctgtcaggcttgcctgcaagcacctcacctgcacagggtacctcacctgcacagggcacctcacctgcacagggcacctatctcacctgcgcagggcacctcacctgcgcagggcacctcacctgcgcatggcacctcacctgcgcagggcacctcacctgcacagggcacctcacctgcacagggcacctacctcacctgcgcagggcacctcacctgcgcagggcacctacctcacctgcgcatggcacctcacctgcgcagggcacctcacctgcgcagggcacctacctcacctgcgcagagcacctcacctgcgcagggcacagacatgcttgaggataagtctgcagtgtttgcctctgaagatcttccttctctgcccttttgttcaaactcagcagtaaatggtgggtgtcgtgcggttcccacagtggagggactcccctagggcccctctggcttgtcccgcatggcctgccctttgcaggcgtccttctgcgtcagggcctcgtgtttccgagagggactttggatttcacgtctcctccctctccccagtaaagttccatcgtctttggttcagctcctgccagagtctcctattgtatgtgtgtcacaattacggggcccagccatttccttccttgtactctgtcttgttttccccatcttggggtttgtaattccccttttctgtgtggtccagcgtgctcggtgtcccgcacccttctggcaggctgctgcctccgcagcccggccctggctctaggtaggaccttctgacccacgagtggtcttcctcctcatccaggacttccgggaggaaaaggttccatcctggactcacatgtctttctttcttgaattactcctctcgggttattaaggagcattcttcacctacttcccgagaagggtcctgagcggccgccccgccagcctggtgactcggccccttttgaaaacactgttgagggacttgagattgggaggcaagtcctcgacctcgagtcccttcactgcctgttctcgctcggacctcagctgcccgagtagctgggtgacaaccctgtgcccaaacccgtggggggcggggggggcagagttcaacttcaggtaccagttctccccagtgtcctcagggtgcactccctggcctaaaaccccccagttactctaggctgactggcctgtgagtcccagggaccctcctgccccctgccccctgcctcctgcctcctccgtgctgggattacaagtgccagccaccacacccagctttttgatgtaggttctagacatcaatttcagatcttcatacttatgtggccagcactttaccagctgtggtaccttcacagccctggccctggcagcccttgcagactgtaaccctccacccccaatttgacagtactgttcccctgaacccagcagttctagggtctccacactggctgtgaggctggcactggaagaaagtgaccagagaggccctgctactgacactgtcaaggtgttgggtagggtggggtgtggtactcctcctccattcaggtttctctgtttgaaatctgctcacagtaacatgcagaagtgcagtggagttcaaagcctccttcagctgcttagcaagttcaaggccagctaaagaggccctggagaagattagcatgttccctcccctgtataaatgaaagaaagaaaagaaaaagaaagtaagaagtgactgcctgtatggctgcctgtgcctgtcaggggccctggacacctgagccaggcagcagtgtttctcggcatgactgaggagtcaagcaagccaggctccagggtgtggcccaggctgtcacagggccagcatgagattatcaaggttgctgctggaacaggccagggccaggccagtccccaggagctgactggcactacagcctgcaagcttcatcattgtcttcagagtgtgctcaccaccgggtgtgtgtgtgtgcgtgcgcgcgtgcgtgcgtgtgtgtgtgtgtgtgtgtgtgtgtgtgtgtgtgtgtgtgtgtgtgtgtgtgaactcctctgaggctgtgctcggttttcctctctgttgtttgagacagggtctctcattggccaacagcaacttacttgacagtgacaggcatgagtttattcggctctgcttcctgtatgcagactccatcacactctccaagccggccctccaccaagtcctggctctctggctccagggtggagccagtcagtttttttagggactgagtcctgggttccccacagggagggctctgccttccctagaagcaaaaggctcctcctgaaggatcagagcaaccttgatccccaggatcaaccttgactccccaggatcagagcaaccttgcaggcatctctgttgtttcactgtggttctgtgaggacagcttttaggtttgttttggttttgtttgtttgtttgtttgtttgtttgggttttaaaggcagagtcagtcttgctgccataggctggtctgcaggctccaaccctctcggctgttcacccttgttgtgaatttctcctcacttggccagggattccgcggtcccagtggtcattttaaggctctgagacctgagccccagccgcaggatgccctgcctcaggcgcagctctctccttgtagcctgcttgcagcggttgttcagggaggtggattgagaaagcatgctgttctgctgtctgcctcgcagaggctgctgggaaaccgccattacagactcaggactggagtgctcgttgcacatcccaactgtggccacacaaggatcactcactggcaggagccaggctgaatcagctgaggttgccttctcaagtgggggaggggcataaatgcatcctgagcccagagtctcacacatgctaggcaagccctctgccactgaccacaaccccagcccctctcttctagataagtgctctaccactgagctacgttctgagactcttttaattttttttttttttggagggggaggacaggggtcagtggggacaagacaggactgagtctcagttccctaggctggacttgaactcatttcgtatcccagactaaccttgagctataatcctcctgcctcatcttccccagtatctgggacaacaggcctgcaaccatcaggtctgcctcttgacttttcctgtgggccacacacacgaagaccttgactctggatttttgtgtgagtgaaagtgtgcaggacacctccttggaagcaggtggcatggactcgctgtctgtgcccaccattgctctgtgcccttagaacgggcagggagactacgtacacctaggattggtgctcaccatctccttggcagcccccctaccccacctccacctatgctgggtatccatggcctgtaactaagagctgtgctgtgttcccagtgacttctcagtcccatggccaccagtgagacttgatgtctcttgtcttggggtaaactctgaagtcattattgcccaagcctggggcaggataccatgcgcccccagggtggcactgcttggtgactctctagtgacgagctctcgagagcccctgtgccatgtttctcttgaccatgctttgttccaagtctggttttgaagcctggctcttaaaaaaaaaaaaacttcatttatttggttggttggttggttttaaggcagggtcttactgtcatgcgttgactggcctcgaactcacagagatctgcttgcctctgcctcctgcgtgctgacattcaaggagtgctatgcacagagaaaactgattttgcatgtgtggacactggagtaaaatcgggattatattttagattcagaattaaattcagactggtgtggtgtgcatgcctaggacacacacacacacacacacacacacacacacacacacacacacacacacacacacacacacacacacggccatgctgggcgttcccgtccatcctaggcttcatgataggaaaagagaatcaaattcaagccagacgtgcgatacactcagaagaatgcggcaggaggatggtgcgtttgagaacagcctgagctacatatcaagacccccctttaaaaagaaaaagaaccacagagaaattcatggtctccctgctctaggcaaggcctctcagcttgcccaccggactctctgtgtagccaagccttggctgggcctgcggacacgaggcggggaggaggccaccagaaattaccaacagaaattaccaggtttttgaggtggtcagaaggtgaagagaacatgaacgcttaaactagagactttagggttctatgtggtgtgcacccctccttcctacagaagggtcgtgaccccagaaggagtccatcctgccaccaggcctcagcaagcttttgttgaccttgctgagacctgagcagctctcaggaagagggagatggaccagcagccacccacagggtcacaccccaggcctgagggacactatgcaggcagagggcagccatgccagagagcggtggcctgacacttgtcatttgcagccacagtgttggtgggatgatgtgacaggcttcctgggtgagggcagaggcagggtacagaacagtaacaaggcccccaccggcttcagagttgggttacttttccttatttgaaaggttttattttttaacttttatgttgcattgtatttatttggggtgtgggggggtgtgtgcgcgcacgtgcacgcaggagtgtgcctcctgtctgcaccacagtttacatgtggaggtcagaggacagcctggtggggtgggggggcactcagattcttccgccatgtggatccccagggttggactcaggtggcctgcgttggcagcagtcatcttcccatgctgagccatctaatgggcctactagaacctctcctattcacttagctcactcatcagccaaccagccaaagccctgggttccaggtgctgctggccgggttctcttatgcacagcccacagctgcgctgccctagcggtggtaggtcacagtggagctgatggcccagggctgagaaatctatgtgcttcctcttctgccagccagcagacctccccacaacccgcctcaccgccaccccactcccctccacagcatctgtttcaaattccctcttgtggagttacttgccatccaagcctgttctcggagcgccatcttgtggtcacttttatgctagccatgctttcacagccagagcagcgtgcctttgctgaagcagctgaggctactcctttcttgcttattagaacctcttggcctggggactcggctacctacagctttggccttggcctcagaggagtaaagcttgtctgccctctcttgggtcctttggttgtgtttctccagcttcctgaagctgatcgcccagtgttgttgccagtagggcagaaataacacctccacccatcatccgtggtgatttggagacagggttctcacccagagcccttcctcccagggtctcagactgactgtgtttttttcttctctttagtgtccccaactcctgtccagcaagtcctcgaggggctgggtcatccagttatcgctttgtccagaatgtgacctccgaccttcagctggccgcagagtttgctgcgaaggccgcctccgagcagcaagcagatgcgtctggcggagacagccccaaggtctgacctcagacatgctgtggggaccaagactctaaagcaagggtcctgagggtggctccgctggggtattcaaggttgcagcacatggctgcattgaaggatccgtctacctatgtcagttcccagacgtgagctttgccattgcagtgagctggagtcctctccccaacccaggacttcttgttctgtccaccgctagtgagacattttcagagtttaatagtctttaagacaaatgacacatttgtctgtcttttctacccaccctgttctttacgtttttcaagacaggtttctctgtgtcaccctggctgttttggcacttgctctgtagaccaggctggccttgaactcacagatccacttcccacatgcggagattaaaggtgtgcgacaccgcctgtgccactcaccaccctcttttgatggtactgggaatcagacccaggagtgagtcttcagagcctataccaccaaccctctttttgctttttattttggggtagagtctcactaagtagccccagctggttttgaacttgtgactgtcctgcctccacctcctcaatagttaggataattggcctgtgccaccagatcaacgacaattttttttttttaataactgtgtctttgttcctttctgtctggtggctgacagtgtgccgggggggggagtgagagactccaggattcagtggttcaaaacctgatttctctccagtgacgtgggacttggggtgtcttctgttcctttccttcctccatgtgtctgtttgcacacacttgcatgtgtgcagcagtgctagcccacaccgtgtctttctcagctcttttccaccgtatcttttgaggcagagtctcactgtacctggcgcttcccctgtagacgtcaggcagccagtgagtcactgggattacagtaacatcaggtcttttatttctcacgggtgccagggatccaaactcgggtcttgatgcttgcacggcaggcaggctctttatgcacttagcatttccccaggcccttgattttgcttactgcttttttgagagactccagtagctgaggccagcctaatactcagacatgctgcgaccgcatgtacacctggccagaggcactattctgaattctttttgttgttgtttggggtttttgaaacaaggtctcaaccataacccaggttaaccttaaaatcaaggtccaacggctgggaccagacgcagtccgtctattgtcccatcgttcagcgagcatgggatggatgaggcgggcctccagggtgacttaatgcagcagccactttggtctgcattgggcttgggtggcctgggtggggggattctgtcctgctccccaatcgctgttttatgtgaactctgccctccaggacgagtcgaagccaccgtactcctatgcgcagctgatcgtgcaggccatctcctcagcccaggacaggcagctaacactaagtggcatctacgcccacatcaccaaacattacccttactacaggactgccgacaagggctggcaggtgaggccctgggagcctgggcagactccgtgcttcacataaacccacagtaacccacaggagatgcctgggagcttccccaggtgacatgcagtgtcacagtactttgtggtgttccagagccattagagagctggtttcgtttcgttttgtttctgtaaaaaggtctcatgtagccaaggcttgcctcaaacttacgtacccaaggatggcctcctgtcccccaagtgctaggactgcaggcatgtaccgccatgccgagattgtgtggtgtggggcttcatgcattatgacctcaaccgcacacacacacacatcatttcatgcagcagctcccgtgtgacttttgtctgtgtcagaggcgctgaggcctcggcgttgcacataattggcacaagcggagccatttgactcctttctttgtaattagcatgctctgctggctaactcacccagaagaaccttttgtttcttttcctttgatgcaaggtctcttgtagcccaggctggctctgaactttctgtgtagccatcagcgaacctcttgtatccgcttcctgagtgctgacattacagagtgcactcagcatgcctgtttcatctggtgctgggggtggagcccggggcttcctgcgaggtaggccagcaccacactaacggaaccacaacccccagctccacaaggggcttttttgagtcaagggctcactgtatagcccaggctgaccttgaactcatgatcctcctgccttggccttccaagcactgaggagacaggcatgagctcccacacccagctctcgggatatgtgttgagccgggccagccgggccagcctcggctctgctccattcctggcttgatcctgtacacttgtctctttcttccacaaagagcagtgaaggattttactgtgtgaagtttgaatagcagaagctaccctgtgccctacgcattccctgggaggggtggtcacctgcagccaggtgccagtcaccaggtctccctctggtggctgtgacccacacatgtctctctctgtctcctacagaactctatccgacacaacctctctcttaaccgctacttcatcaaagtccctcggtcccaggaggagcctgggaagggctctttttggcgaatagaccctgcctccgaagccaagctcgtggaacaagcattccgaaagcggagacagagaggtgtctcctgcttccgcacccccttcgggcctctgtcctcacggtaagctccctggcactgtgtagaggctagacccccgggtctcagcagtgggggagacttggtactggaggactgtggtctgttccatggagcacaagttccctttgactctggcttttctctttgctgcatttccccattaactcatttgttactttacatcctgatcccagcgtcccctccctcctctcctccnnnnnnnnnnnnnnnnnnnnnnnnnnnnnnnnnnnnnnnnnnnnnnnnnnnnnnnnnnnnnnnnnnnnnnnnnnnnnnnnnnnnnnnnnnnnnnnnnnnnnnnnnnnnnnnnnnnnnnnnnnnnnnnnnnnnnnnnnnnnnnnnnnnnnnnnnnnnnnnnnnnnnnnnnnnnnnnnnnnnnnnnnnnnnnnnnnnnnnnnnnnnnnnnnnnnnnnnnnnnnnnnnnnnnnnnnnnnnnnnnnnnnnnnnnnnnnnnnnnnnnnnnnnnnnnnnnnnnnnnnnnnnnnnnnnnnnnnnnnnnnnnnnnnnnnnnnnnnnnnnnnnnnnnnnnnnnnnnnnnnnnnnnnnnnnnnnnnnnnnnnnnnnctcccctcctctcctctgcttcttgaagcagtcagtgaggtggctgctggctgcttcagtggtgtgtgtaggaggctgagccagccataacctgttcaaagggcagggtaccagagctttcactgaatggccagaggctcccctgctgatgttgggaccttgagctccctctgctattaatggagccatgttgggagcataacttgtcgctggaagcagaattggatggacagaccccaccactaatagctagctccactgggttgtgcacctgtctggcaggtaaaggccatttggacagctctctctgaccacgtgtggtccatgggagctggtacttcttttttttttttaaagatttatttattcattatatgtaagtacactgtagctgtcttcagacactccagaagagggagtcagatcttgttacagatggttgtgagccaccatgtggttgctgggatttgaactcctgaccttcagaagagcagtcgggtgctcttaccccctgagccatctctccagcccaaggagctggtacttctaaggacagctgttgagtctgcctgtggtcaccagcagatgagagactcctgactaacatgagtcaggtggctggcactctcaggactacaggacagcagaacctagtgctcctgtcctagtgtcacactgagcctaggaggggcttctcggataggagtgcctgcatctgcactagtcatccttgtggtcgtccaatagcagtctggggtttgtgtagtactgtgattcaatcaacagcctcatcctggtagtcggggctttaccactgagccacaagcctagccccctgccagaggatgcaaggccgggctggcactctactgctgagctgagctgcgctccaaccctgtttgtttcacctttcactcggagtcagagttgtccagactggccttgaactcactctgtagcccaagcagaccttgcgcttcaggccctccagcctctgccttccaaatagcaaggatgacgggccagcattgtcacacctggctacaagctttttcttttggcataggctgagccgctcctggagggtggcaggaccttttatgcggtatgtactgcagaatgtgcagttgctaggaagcagtccttcctctacccctcagcctgtttaatgggcaccttcctacccagctccccactgcatggaatagcagtgctgggtcttcatcaccagggagaacctgagggagataagagagaagctcctgcaagtacaacgtggagacatggggagatgcgaggcgcatcccgtgaggtgcacgttagaaactgttcagcagagatgggggtgggtagtctgtattcgtagactcactggctcagatgtctgggcaggcataggatgtctcacaattgttgaatggggtgtgtgtgggttgtgtgggtgtgtgggtgtgggtgtgtgggggggtgtgcctctacctcctccattatgatgtgccaccttggtgtgtccctttctcttctcaggagtgctccagcttcacccacccacccagggctgatgtcccctcgttccagtggcctgcagaccccagagtgcctgtctcgggagggctcccccattccacatgatcccgacttggggtcaaagttagcctctgttccagagtaccgctattcccagagtgccccaggtaagacataggttcatcctcttcccggatgtggcagactgggtgccgcccatccatgtcactgtcctctatgtcatcctgcaggctcccctgtcagcgcccagccggtgatcatggctgtccctccccgaccttccaacctagtggctaagcctgtcgcctacatgccagcttccatagtgacctcacagcagccctcaggccacgccatccatgtggtccagcaggcccctaccgtcaccatggtgagggtggttaccacctctgccaactcagccaacgggtacatcctggctagccagggctcgactgggacctcccacgacacagcaggcacagccgtgttggacctgggcaatgaggctcgaggtaatgtgaccgcaactgtgtcccagcacagttgtcactgttaggcagggtgagcccgggccagcagggaggtgggacttggtcactgtcctcctagagtttaagacagcgtggcttccccctgaagactcagttctaccgtcactgacagggctgtgcgtttaaactgtgttttcattcaagggaacaacagtcaagatgcagtcctaattgacttatttaaaagattggtttattattattctgtgtatatggttgttttgtgtgccgtgtctgtaccacagtgcctgaggaggccagaaaggggcatcagataccctcaaagtggagttgacagttgtgagccactatatggatgggcttaaccactggaccatctctccagctgtttatttatttttagacagtgtctcagtatgtgtccctgggtgggctggcttcagacccactgtcaccttgcctcggcactgctgagattacagacagacatctcatgcctatgtctcatctccttcctaaggagctatggtgtgggcattggcgatacactcagttttgtgaaaggcagcctcagaactctctgggaagtgatatctcttggtcgttattcccactggggactcagtttcagtgttatctgtgtaccttaatgttgtcattatggagactggctttgcctgatggcacaggcttgttctcccagctcctacagaggtggggccagcttgggctgcgcagcaagctgaaggccagcccgcgtaacttaactagactttgtctttaacaattagagggggtggagtggggctggagatgacccccattgagcatgtagccttatgttcaatccctggcaccattaggaacaacaccgaaatagtgattgcaatcgtagaaatgacatcttagcaaaagagacagtcgcagccctaacagcaaactgtctcattcctgacaatacgttttgcctcgcagcttaagtttgggtcagttgtagttgaaggtataattatgattttttttaattttcattttggttttggtgtttgtgacaaaggcttgtggagcccgtactgaccttgaactcactctgtagccaaggatgacttgaaatcctcctcggtgccccacctccatccccagcatgttctaaagccctgtgatttaaacatatctccaaggattgtcctaggaaggcctctcccggtgctgccccattccctgccccgcagccaacttcatgctgggcattggtgggactcggtggctggggccacgtgtgcttctgactgactgtctgccccacaggtttggaagagaagcccaccatagcatttgccacaatccccgcagccagccgagttatccagacggtcgccagccagatggccccaggagtccccggacacacagtcaccatcctacagccggctacaccagtgactatcgggcagcaccaccttccggtccgggctgtcactcagaatggaaagcacgctgtacccacgaatagcttgactggcaatgcttatggtgaggccccagcctgttcagcctgagcccagcaccggggacccaccctgaggcagcacagctcaggggagcgcatgcctgctttgccagtccactcggttcagtgtcctatgcacctgctgtgtgccaggactgaggccatgctgggcaaggcatactggtctggtgaccccatgttggctaggatggaatggaggtcagaggaggaagtcaggctgcccatggggtgctggtggctaggtctctctgcgcccaggcatggtagttatttttcttgttgctataataaaatacctgatacnnnnnnnnnnnnnnnnnnnnnnnnnnnnnnnnnnnnnnnnnnnnnnnaaggtccttccaacatggctgggaggcatggcagcagtcaggaagcagagggagaggaagccggtccttagcttgctttccactttagtcaatcttggaagccagcgcaggacggtgttaccacagccagtgtaggatgttgtcaccacaggcaggataggtcttccctcttcgtgaccctgatctagaagcccctcacagacaggcccagaggtttgtttccattgcaattttaaatcccactaaggtgatgtaaagattcatcatcacagaggcaaagaggggagggaggggcatcctcagggtgacagaggcagcaaagaaaagggccctgagtggagtcgggtgttgggtgtctgactcaaacttgctgtcggcggggagaaggagtctgtgtgaggaacgggcagagaaagaactgtggctctggctttgctgctcgggtcagttagtggtcaaatagtgatgacccttaagtaacctcttcttcctaccgccagccctcagcagccccctgcagctcctggcagcccaggcaagttcatccactccagtggtcatcacccgggtgtgtgaggtggggcctgaggagccagcagcagccgtctcagtagccgctaatgcagcgccaaccccagccgcctccactaccacatctgcctcttctagcggagagcccgaggtcaagaggtcccgggtagaggaacccggtgggacagccaccacacagcccacagctatggcagccaccggccctcagggcccggggaccggcgagtgaagtgtcgcctgcaggaaggtggagtgaaactcacgccacaggagccctagtggccagcagctacattcaaggaccgagtggaaaagcccatcacagcctgcagccctcatgtgggtggccgccgcactcggacagtttcctttttatctcctgtcctcccatggtttgaaacaaacacataaacacgtacagacaacttgattgtatgaatctgggggttctgtgtgtttatttacccctctctcatgccatcgcctctccccagttcttgggggagaaggtctatctagcccagctcctcaggaatggatcccaggcagcgcccacaacaagagcctgagccccaggcctggacagaagcacagtgcaaacccaggctcctctctctgagagtgggtccacggatttcctatttgtgactgatccgggaatagaccagaaaacagaatggcaagaacttcccagccacaggctaggatacagagccctctccccaaaagtgacagagactgtggcattaactggggtcagggagatctgctttggctttggaccctaaatatttctttcagctaaatatggaatctgggctcatctccaacctgagacacacagagcagaccatgtgtctctgaggttcccttttgtaggcagccaagcaacaccaggccctgcgctcgaccacaccaggccctggtgaacatgccgctctccctgataactccaagaaggatgggcggctcccacattgatggatcaaagagctctgggttgaaagtcagcccagggccagtgcccacagcactgaatgagtcgagagctgcaagctacaaacggatctccagggaagcctgagccagctgcaagggaagtcggtcagccacttgctcagcaggaggatgatggatggtgggtggtatgcggcaggaagacagcagaggatctgggcggtgatctgctcacaccgtctcctcccccacccaccccacccccattccagttaactgagaaccctgtccagtttgaaaatggaaaccctcttttctacctgaccgttatcctctggaaaggaaactacctctccggacagcagtcggtgccaagtttgagtacagtgcagcaagaaccaaagcgtgggtgtcagctgaggacttggacgcccggggaaggtccctttgcatgccggacaagtgaccaacagcactttaacatacaccacaccaagtctcgtgagcaggagccatcaaatgtttctctctgtgagaatgagagttgattttatagaagcagtcatgggggctgtgcgacaggaaactccaaagcagccagaaactcagtgttggtcctcctagagggtggtcggtaagcagctggcaacaacttggacagagccccaggccctgtcgttggtatcaaaccacccaccagtcagccgccttctctgcctggtgccggtcagaagaggcccaagggccctgtgggcagagagcaggctggacaagctgcctttgctggaagggactccagacctggaggctgtggtcacaggagagcagatgaccgggatggataagtccaagctccgatgtatggctgctgccattgaagccaccagtgccccccacacatcagggaccagggcggagcacctgcctcctctcttgagctatctcccaagctccccagccagtcatttctgtagtactcggcttcaagccagtgttttggaggtctcctgcctattgcctggaaaggttcagagaagtggggctggtgtgatggtggctgggggaggggtttcccctcagagggggcagagggctggctctgtctcacatcttcccttggtacctggcatgaacttctctctgtgtgcctggtgtgagcctggggttagggaagaacgaatggggtggagatctgagttgcgtagtgggctgaggtgacaagggacgttggtgccagctgctgatctttccctccatcaccctttactccagggctgtccatggtcaccctccaaggcagattaagattgtggatggtcatgagcaggttgctgtcccagttcctgaaacgtgggctccgtgctctgaggcagatcttcaccattaacaggggcgtggaagggtatggagagagagagagaacacacactgtcccggtacacggcctgacggcctggttggacagcctgagctacaaggaggctagactagtgctgctgctctgcggagtgggtttggtcatctgctgggcagaagctggcaccagagcgtgctcccacaagctctgagccaggagggccatgtccacgcactgtgtggcccatggctggcaaccctggagcaccccactaagccctgggttgggggaacaattcaggaacagatgtgaagcctttatagacaaaggaaccccttgggcagtggtaaaacagtgtaaggtgggggttaaaggtcagtgaaatgtaagaagaaacccttccccatagagagaaacgggtggattgttcctgttcttcctcaaaatcctcaaatttcataacacccacgtgacattgctcgcccagtccctccctccccatccgaactgcacagtgcctgcttagaataagtcagaaaggggtggcgtctcagctctagtgaaaggtccctcatgtgtgggaaacatcacatcctggccaggagaggcaaagtcaccacaaatggccacagggtaccccgaggctaggtcagggggaacagagcggccacctatatcctcacctccggtctcccagaatacctctgcttagaagcaatattaaaaaggataagtcaagctgttccaaagattgccactgcagacaccacttcccttcagagcaggccctctgacagggactttggcttgctgggccgggtgggcggggcagagaacagaggccttctgcctgctgcttcagtcctgctccccatttaatgccccctttcatcttgggagttctcatgaactcagggtgggtcttgcacccacctgcttgttgggctctagattgttttgttttgggttttgtttgtttgggtctgtcctgcaaggtgagctactaggccagtgctctaccactggctgtactcccagccattttgattttttaaacttgagatgggactcacaaagctgcccaggctggccttgaactcccagtcctcttgcctcagcttcctgaatttctggggtgatggcctacatgctaccatggcccagcgctgtttgcgttttgtctttttttgtttgtttgtttctgtaccaaaagctgctacactggtgacacagcagggtgtggcctaggtgcccccacagactggcatatggcacgtctctctctctctctgccctccctaacccctaacgtcacagctgcttggcaagggaacatttttgaaccaaccacagatgtttccttaggaaaagtaggttttctactcgtggtgaagaacaaaagccccctgagtggtcctggctgctcctctgcattgcctcactgctccaaggttccctctatcaggcctcagctctactgcagggaacattctagaacctgccccccacacacacactcccccccatgggcacggggcataacagcctgggcaggcctgtcccacagatgaggccagccgcatgccttctccagaggtaccatctgggcacgaggcaggacagaggatgctcgaagggaggaagcggccagctagagggagagcagtttggtaagagctaaggggaggtaagccggtgggactggaggctgagggctgccctcacagctggtgccgagccagcagtggtaaagatccctcagtgaggagtctgtctgtctgtctgtctctgtgtgtgtgtgtgtgtctctctctctcaaaatacttagagtgcttcagtcacaatgaaaagcatgtgtttctgtacttgggctaagctgtcaaacacaggctgcctagggcccccaggaacctcttcccctaagtccttgtctgtgtgtgcacgcacacacacacacacacacacacacacacacacacacacacgcacacctgccttgtgagagttagaggactagaagggcctgctgctttacctctggaatcctgttcctgtgactactcacaggtgaccagtgtggaggaatctggggcccaggcaccccaaaagcctgagtgcagacagtggccaggtgtggtccacaaccccatatgtgaagcacttaccaccattagagcaacctcagcactgtcccctgtgtccctgggactggctgactctgagctccgtgacccactgaatgttcatgttctctgtcctgtatgtatccaaatggcaccttggcttctgagtctgaatttgctggcttagaacttttgtttttaattggtaaaactgggaattcaaaaatctaatattttcaatttggtccctctctcccatagtctcctcttaacgtccttcctgggtgggaggggcatttgggatccctgataataccttagcttgattcttaggctgggaaaaggtggtgggggtggggaggggtgaccctagctgttttccaggtctctccttggattctgctgtgttcttggggggggcgggcagcagctgtgcacgtgtgagggaggggctaaagccaatagtgaggcggttctttttcttaactgaatgataattctgtaaaagtaattgggggagggtcttcagggagtatgtgtgtgtgtgcgtgcgtgagagcatgtgtgattttgttttgtttcattttttacagtggctgtcaagtattttcatgatatgtttaacacttagtgctttaaaagcagtggtacccaatacgatgggaatccgagttccagagatgggacgtgccccacctcagtgagcgaaggtcccactctggaggcaggggtaagaaaggcctgcggacccacacaccaagcagcaacacctgggcgttcatttcaaacgggatacagtatttttttataacagaaccatcctttttttaaacaaaaagttttgacacctgaatgtgatttctaactattattagacgttaatgttttaaagctataacaaagtggaaatttctactttctttttcattcatttgaactgttcttttatctattcggttgttgtatgtgggtggggaagctctgttttctcctcttagcatttgtttctataaccagaaataaaaattatatattaaagagatgtacccaagggtatgagtggtccctgggagtgggtgactgtgaagggcagaccaatagatagcctggacacgcactactgcttctggtccccaggtgtttccttgcatgcctcccaggtgtgcagtccaggaagccatggggtgaggtagagtcttgccggtgcctgagctccaaggatgcaagatggtgtacagatggcaagagctagcccatctcccctgacttttgacacaggtccaccgctgggccagggtgtgacaaagggggtggcatttaatttgcagctcgaagttccagagggttagagtctatgaccattgtggcagggagcgtggcagcagacaagcaggcatagggttggggcagtagctgagagtttacatattgagacagccgctgcaggacagagttgagctaatgggggatgctttgggcacttgactgcaggccacaccccctaacccttcccaaacagttccaccaactggggtcaaaacattcaagtatatgagcccatgggagccattctcactcaagccaccaccccatggcggctgcctcagagcccctggcattcatcctgacactcagccaggtgagaaacaacccacttgtcccttttttctgtgtacatgtttttgggtgtgactgcacctgtgtgtgtatttgtgtggaggcagaggacaacctcagctgctgttcctcaagtggggtgtgtgttcacatgcagaggcataggcatatgtacactggccacaggagacgtgagcagatcagaggacagccttcaggtgcccaccctcatggctacttacaccttgtctgagacagattctctttaccatctcataagccagggcggcttatcctccagcctcaggagagtctcctgcctcctccatctcctgtaggtgtgctgggattacaaatccttacactactgggctcaggttttatgtagcttctgaggacccaaactcagcctgtcaggcctgtgtgtcaatcactttcaggttctgagtcttctttcttgccctacctcttctctgagacagaatctctcgttggcctgggacttgccaagtaagctagggccggccagcaacccttagggatactccgatctccacttcctcagtgctgggactgcaagtgtgggttttatttttatatggccacccagggatggaactcaggtactcatgttcacttttaccagctgagccgtttctacttctgcccgtttctccctgaagccttgcttattactaggccatgagcactaggtattgattggcaagagccagaaagacacgggtccaagtgtctttcccactgtgacagctcctcagtctactaccagtttcctttttctgtgtgtgcaataggcacccatctcccaacccaaataggtgaatagtgccagggcctcatcttaaaacccaagactagcaagacattgggtatttctgcagcaaagagcctgacagaatttataaaacgtgtctgccatacagcttttgctaaggatgttctttctctgccaccaagtcgcgcccccagcctctcactggggtaaatctagtcaccctactgctaaactatgtgcctgcctagtctctccaggtctagagtctaccactggcagttccgggatcaaaggaaactgtttcggagccaggagttctgggttccaaggaccacggttccatgactccctggctgctgactgacgtggagagaagcccaggagctaggcgggaactggcttctgtactgcaatattttggccaaggcctccgccccgccccgcccacctgccgcaggaccggaagctggtctgtcttttgcgcgggggagtgggagggatggccctcccacgtggtgtggcaccggaagccgtcagctagcgctccagattctcccacgtgatccagccaggacgcgggagggtggtggcgggggtaagaggtggggcgaaagagggcagacacagtccggtcacatgacacgtcatgtgacacgatcccggaagtccgcggcaacgtttcgggcactggtgggcttggagccgtgtcggcatgttctcggcgggcgcggaaagtctgctgcaccaggccaggtctgccgatctggggctggggccacggggcgtgagacgaagccggggaggagcggggaggcggtggtcccgctgcacggttcgggtctccgtgtggcgccgggtccggggctcagggcgacctgcgtggaatgtgaggcgcacaactcagctaagggatcctcctcatcgtgtctgggtccatgctagtgctgaccctgcactgagagtctaggttctttcccaaatagccagcccaagacttggtggtacgtgattcagcgaaggaaacgactacccgaagcccagacctgatgcatttggtaaactgaaaatgcaaagggacaaatctggactctgagctgggccactcgtggggaaagtttagaatggttaagatctctgggatctcccagagcctgaaagagttaaaagtctggagtctacgaacaagacagtactccgaagacagagggacttaataggtaaatgaccttgccaccaagcctgactctctcgattcgacccccggggctcggggaggaagaagaaaatcaactccagcaagttgtctttggatctccactcgagcaccccaacatgtacataaataaatgtaataaattaaaaaacaaagacagttttcttaagatctattaggaaaatggttggtgacccagccacacagtctccccatgggcccacagccctcctttgccttcagtactgggtgggtacttttcatttttaagcagtaaccttttcatgccaacacaaaaataacgctatcctgtctcatagcatctgtggtttatcactgccccagttgggtacaaccctgggccatttgtatctccttttgctcacccagcctgttctctaggtgcctcaataagactctgggtggaggatgcaggaaacaaagcaggcgagggtggtaggaaagctactggagaccttcctcggcctgggacatgtggtacctgcagagacagtgcagaaccaagttcaagtacctgacagacaggctcaaaatgggggcagtttgcaaaccatcagccctgtcaggacaccatagtgggactgtcagccatgatttaggaagttgggggctctcttcctcagcgcccacagacaactgatccatttatttatttatttagagatggctgagacagagttttactgtgtggcccctgaaactcactctgtagaccaagctggcctcagactcacagagatccacctgcctctgcctcccaagtgctgggattaaaggcgtgcgccaccaccacgctgggcaattccttcatcatggccctttattttgtggtgctgggaaggaacccagcatgcatgtaggcaggcaccccttccacctcttttccttccttttaagcttggaatagaagcaaggaaacacatttccacactgaagcccggctcagtcctagagtgtttgtgttaggccagcgacatctcaggctttcttacagtcttacagccgggagtctttgctcttcagtgtggaagctttgcattgctcttctcccaaggctcagggaagcggctttcaacacgtgtgagtgctgcctttgaagttgagagtacttccttattatgtaaggccctgggggtggggggagccaggcaaacaccttgggaagataaggaaaggggatcaagagtttgagtctgggctatgtagtaagttcaaggccatcctgggctacattgcaagactctagggtaagaggagaggcagcttggactaaatatccctgacttttgaaagactcataaaaccttttactggcacggagaagctgaggcaggaggattgctgcaagctccaggctagcctgggctacaaagtgaggccctgtctcaaaaagcaaagccttaaaaaacagtgttttctttttgccacgggagcaacagaacaaagctgtacgcctcaccattaatgggtaccactaggaaactgggggtgctgcgtctcagtcccaggggaggaacctgtctgtgccccaggtcctataaaatcacccgcaggcactgtgagcctgggtgactgttccctgccttctctgtcccccactaggggcgtgggtcagcgctgtggtcccccttccttccttagggaaatccaggatgaggagctacggcgtttctgctcccgggtcactaagctgctgcaggaagccccaggaccagccaccgtggatgccctgcagagactcttcctcatcgtctcagccaccaagtacccccgtaggtgagtgagcagccctggacccctgtgcatcctccagacaggtcccagccagctttcctgagatgccagtgttcttgacatagatcttgcgttccaggctggagaagatgtgtgtggacctgttacagaccactctctgcttgcctgccagccctgagcagctccaggtcctctgtgctgctatcttgagagagatgtcaccttttaacgacctggccctgtcctgtgatcacaccccaaacacccggcagcttagccttgtggcctctgtgctcttggcccaggtaagacaattgccaccattggggttggtggggtagtgggtgagtggcgtctgtttctggtggttctgggaggtctcaggaatacagcaagctggtttgcgtccctccatgtatctgtgtgctacagcgacccagtcagcttggtgcccattcctttggatggtctaaagattgattgatttattgattaatttaatgtatatgaatgcactgtagctgtactgatggttgtgatccatcatgtggttgctgggaatgaaggttgctcactccagtcggcccctcttgatctgacctaaagattttttttttttttttttttttttttggtttttcgagacagggtttctctgtatagctctggctatcctggaactcactttgtagaccaggctggcctcgaacttagaaatccgcctgcctctgcctcctgagtgctgggattaaaggcgtgcaccaccacgcccggcttggcctaaagatttatttattattatatctaagtacactgtcgctgtcttca

SEQ ID NO: 934 - DNA, 2459 bp, Mus musculus
accggagccgctcggagctgcgcgaacatggccgaagtcggcgaggacagcggcgcccgcgccctgctggcgctgcgctcggctccctgcagccccgtgctatgcgccgcgtgcgccagagccccgggcctgccctggctcgcctggagggtcgggagttcgagttcctgatgcgacagcccagcgtcaccatcggccgcaactcgtcgcagggctcggtggacctaagcatgggcctgtcgagcttcatttcccggcgccacctgcagctcagcttccaggagcctcacttctatcttcgctgtctcggcaagaacggcgtcttcgtggacggggccttccagaggcgcggagcgcccgccctgcagctaccccaacaatgcaccttccggttcccgagcacggccatcaagatccagttcacatcgctataccataaagaggaggccccagcatcgcccctgcggccactctacccacagatctccccactgaagatccacattccggagccggatctccggagcctcgtcagccccatcccttccccaaccggcaccatcagtgtccccaactcctgtccagcaagtcctcgaggggctgggtcatccagttatcgctttgtccagaatgtgacctccgaccttcagctggccgcagagtttgctgcgaaggccgcctccgagcagcaagcagatgcgtctggcggagacagccccaaggacgagtcgaagccaccgtactcctatgcgcagctgatcgtgcaggccatctcctcagcccaggacaggcagctaacactaagtggcatctacgcccacatcaccaaacattacccttactacaggactgccgacaagggctggcagaactctatccgacacaacctctctcttaaccgctacttcatcaaagtccctcggtcccaggaggagcctgggaagggctctttttggcgaatagaccctgcctccgaagccaagctcgtggaacaagcattccgaaagcggagacagagaggtgtctcctgcttccgcacccccttcgggcctctgtcctcacggagtgctccagcttcacccacccacccagggctgatgtcccctcgttccagtggcctgcagaccccagagtgcctgtctcgggagggctcccccattccacatgatcccgacttggggtcaaagttagcctctgttccagagtaccgctattcccagagtgccccaggctcccctgtcagcgcccagccggtgatcatggctgtccctccccgaccttccaacctagtggctaagcctgtcgcctacatgccagcttccatagtgacctcacagcagccctcaggccacgccatccatgtggtccagcaggcccctaccgtcaccatggtgagggtggttaccacctctgccaactcagccaacgggtacatcctggctagccagggctcgactgggacctcccacgacacagcaggcacagccgtgttggacctgggcaatgaggctcgaggtttggaagagaagcccaccatagcatttgccacaatccccgcagccagccgagttatccagacggtcgccagccagatggccccaggagtccccggacacacagtcaccatcctacagccggctacaccagtgactatcgggcagcaccaccttccggtccgggctgtcactcagaatggaaagcacgctgtacccacgaatagcttgactggcaatgcttatgccctcagcagccccctgcagctcctggcagcccaggcaagttcatccactccagtggtcatcacccgggtgtgtgaggtggggcctgaggagccagcagcagccgtctcagtagccgctaatgcagcgccaaccccagccgcctccactaccacatctgcctcttctagcggagagcccgaggtcaagaggtcccgggtagaggaacccggtgggacagccaccacacagcccacagctatggcagccaccggccctcagggcccggggaccggcgagtgaagtgtcgcctgcaggaaggtggagtgaaactcacgccacaggagccctagtggccagcagctacattcaaggaccgagtggaaaagcccatcacagcctgcagccctcatgtgggtggccgccgcactcggacagtttcctttttatctcctgtcctcccatggtttgaaacaaacacataaacacgtacagacaacttgattgtatgaatctgggggttctgtgtgtttatttacccctctctcatgccatcgcctctccccagttcttgggggagaaggtctatctagcccagctcctcaggaatggatcccaggcagcgcccacaacaagagcctgagccccaggcctggacagaagcacagtgcaaacccaggctcctctctctgagagtgggtccacggatttcctatttgtgactgatccgggaatagacca

SEQ ID NO: 935 - protein, 622 aa, Mus musculus
PGPARLEGREFEFLMRQPSVTIGRNSSQGSVDLSMGLSSFISRRHLQLSFQEPHFYLRCLGKNGVFVDGAFQRRGAPALQLPQQCTFRFPSTAIKIQFTSLYHKEEAPDLRPLYPQISPLKIHIPEPDLRSLVSPIPSPTGTISVPNSCPDRGAGSSSYRFVQNVTSDLQLAAEFAAKAASEQQADASGGDSPKDESKPPYSYAQLIVQAISSAQDRQLTLSGIYAHITKHYPYYRTADKGWQNSIRHNLSLNRYFIKVPRSQEEPGKGSFWRIDPASEAKLVEQAFRKRRQRGVSCFRTPFGPLSSRSAPDTHPGLMSPRSSGLQTPECLSREGSPIPHDPDLGSKLASVPEYRYSQSAPGSPVSAQPVIMAVPPRPSNLVAKPVAYMPASIVTSQQPSGHAIHVVQQAPTVTMVRVVTTSANSANGYILASQGSTGTSHDTAGTAVLDLGNERLEEKPTIAFATIPAASRVIQTVASQMAPGVPGHTVTILQPATPVTIGQHHLPVRAVTQNGKHAVPTNSLTGNAYALSSPLQLLAAQASSSTPVVITRVCEVGPEEPAAAVSVAANAAPTPAASTTTSASSSGEPEVKRSRVEEPGGTATTQPTAMAATGPQGPGTGE

SEQ ID NO: 936 - DNA, 100691 bp, Homo sapiens
  misc_feature (1)...(100691): n = A, C, G or T/U
ggcatagctcttaggccttgctttgggtttataaacacagtctctctaaagatttataacaacttttgacagggcacggtggctcacgcctgtaatcccagcactttgggaggtcaaggcgggtggatcacctgaagtcaggagttcgagaccagcctggccaacatggtgaaaccccgtctctactaaaaatacaaaaattagccaggcatggtggcgggcgcctgtaatcccagctactcgagaagctgaggcaggagaatcacttgaacccaggaggtggaggttgcagtgagccaagatcccaccactgcactccagcctgggcagcagagcaagactgcgtctcaaacaacaacaacaacaataacaaacaacaacaacaagcttttaaattggccaggcactgcgattcactgagtgtaatctcagtactttgggatgccgaggtgagaggattgcttgagcccaggagttcaagaccagcctagacaacatagtgagaccctgtctctacaaaaaacaaatgtttttaaaactagctgcagctgggtgcggtggctcaagcctgtaatcccagaactttggaaggccaaggcgggcagattatttgaggccaggagtttgagaccagcctggccaacatgttgaaaccccgtctctactaaaaatacaaaaattagctgggcatgatggtgagtggctgtaataccagctacgtgggaggctgaggcgggagaattgcttgaacctgggaggcagaggttgcagtaaggtgagatcactcagactccatctcggaaaaaaaaaagaaaaagaaagtagctgggcatggtggcatgtgcctgtggtctcagctactcaggagactgaggtgggaggattgcttgggcctgggaggtcgaagctccagtgagctatgatcatgctactgcactccagcctgggtgacagagtgagaacctgtctcaagaaaaaggaaagtggctgggcgtggtggctcacacctgtaatcccagcactttgggaggccgaggcaggcggatcacgaggtcaggagatcgagaccatcctggctaacacggtgaaaccccgtctctactaaaaatacaaaaaagtagctggacgaggtggcgggcgcctgtagtcccagctactggggaggctgaggcaggagaatggcgtgaaccctggggggcggagcctgcagtgagctgagatcgcgccactgcactccagcctgggtgacagcgagactttgtctcagaagaaaaaaaaaaaagaaaagaaaaagaataaatccactattacatttttgtacaagtttttgtgtcaacatgaagttttcagttcacttgggtaaacagctaggaatgagattgggggatcctgtggtaagtgtagcttaacattataagaaactgccaagctgtttttcaaagctgctgtaacatttttttttaatctttcgaaaaatatttatttatttattttcaggcagggtcttgctgtgttccccaggcgggcgtacagtggcaagatatagctcattacagcttctacctcctgggctcaaggggtcctcctgcctcagtctcccacattgctgggactacaggcatgttccaccacattctgataatttttcattttttgtagggatgggggtctcactgtgtagcccaggctggtgtcaaactcctggcctcaagcaatcctcctgcctcagcctcccaaagtgctgggatgacaggcacaagcccccacacccttctagctgtaccattttgcatgccattggcaacataagagagttccagttgctccacattctcaccaacagttgctattgtcagttttgttttctaaggaatgtgaataggtgtgtagtgatagctcgttgtggttttaagttgctccctaataataacattgatcatcttttcatatgcttgcttgtcacccatactttttttttttttttttttttttgagacagagtcttgttctgttgcccaggctggagtgcagtggcacgatctcggctcaccacaacctccgcctcccgggttccagcgattctcctgcctcagcctcctgagtagctgggactacaggggcctgccaccatgcccagctaatttgtgtgtgtgtgtgtgtatttttagtagagatggggtttcaccatgtcggctaggctggtgtcaaactcccgatctcaggtgatccgcccatctcagcctcccagaatgcaggcatgagccaccgtgcctggtcccatataccttctttggagaagtatctgttcacatcttttgcctaatttttaaattaattaatgtatttttagaggcagggtctcgctcttattgctcaggctggagtacagtggcacaatcatggctcactgaagcctcgacctcccaggctcaagcaatccccccgcctcagtcccctgaggagctgggactacaggcatgcgccaccacacccagctaatttttgtattgttgtagagatggggtttcactatgttggccaggctggatttgccaattttttaatggactgtttctctagatattttattgcctctttaacaataaaattaaataaactccctctttcacacagccttaacttcgtgtagtggtcttgtggatggcttactgccttggagttaatttcgttccttctcgtttctgctaccagcttcacaggcttctgctaaggtaagagcctgggtatggtggagcctgaaaaggttaactcactcttcctttgcaagtttttttttttttaatggagtcttactctgtcacccaggctgaagtgcaatggcacaatctcagttcactgcaacctccacttcctgggttcaagtgattctccagccttgcctcctgagtagctgggattacaggcgcatgccaccacgcctgactaattttgtattttagtagagatggggtctcaccatgttggctaggctggtctcaaacttctgacctcaggtaatccaccctcctcagcctcccaaagtgctgggattacaggcgtgagccaccacgccaggctgcaacctttttacttttctttttttgttttgtttttgttttgagacagaatctcattctgtcacccaggctggagtgcagtggtgtgatcatagctcactgcagccttgacctcccaggctcagcctcttgagtagctaggactacaggtgtgcaccaccatgcttggccaatttttgtatttttttgtagagatgggggggtctcgctatgttgcccaggctggtctccaactcacggactcaaacaatcctcctgcctcagcctcccaaagtactggtgtgagccacctggccagctatgcttctttttttgagcacatgctttgtgagacagctttcacatgccctctggacctggagagagtgagagaagaattcagtttctaacatcttggttggtcaatgcctttttactggtcctttttaaaccttccctgtggaagctaccaatatatccaatgactgactgcgtaaggaaaaaggaatggcaaatgattaaacccatgcctggacttgccaaggtcacagggagttggcctcgtgaactccttgcagtattattgtacagtgttttgctccttggggaaaacatcatctaggtttgtcagtttgtgcacaattctttctttcttcctttctttttttgagacggagtcttgctctgtcgccaggctggagtgcagtggcgcgatctcacctcactgcaacctctgcctccccggttcaagcgattctcctgcctcagcctcccaagtagctaggactacaggtgcacggcaccatgcctggctaatttttttgtattttagtagagacagggtttcaccatgttggtcaggctggtcttgatctcctgacctcgtgatctgtcccccctcaccctcccaaagtgctgggattacaggcctgagccaccatgcccagcctctttcttttcttttcttttttcttttttttttttgagacagggtctcattctgtcccccaggccggagtgcagtggtatggcgatcttgctcaccgcagcctcgacctccggagctcaagtgatcctccagcctctgtcccgtaagtagctgggattacagccatgcgccaccacacctggctaattttttgtattttttgtagagacagggtttcactgtgttgctcaggctggtgtcaaactcccgacttcaaatgatctatccacctcggcctcccaaagtgctgggattacaggcatgggccgcctcgcctagtctacaattttttttttttttgagatggagtctggctgtgtcgcctaggctggagtgcagtggcgcaatctcagctcactacaacctctgcttcctaggttcaagtgattctcctgcctcagcctcctgagtagctgagattacaggtgccaaccaccatgcccgactaatttttatattttagtagagacgcggtttcaccatgttggccaggctggtctcaaatttctgacctcaggtgatcctcccgcctcagcctctcaaagtgctgggattacaggcgtgagccaccacgcccagcctacaattatttacatttaatattgttaggcctatggtgcctggaagtacatacatgcctcttgtcattaaataaatctgtcattaagaagtcagaagtcatctcaaggagtccaaaggaagagaccgtatgaggaggttgtatgtaaatctctctctttacaattgtggtaaaatacacataacataacatttaacgtcttaaccgtatttttttttttttgagaccgagtctcactctgtctccaaggccggagtgcagtggcgcaatcttggcttactaaaacctctgcttcctgggttcaagtgattctcctgcctcagcctcctgagtagctgagattacaggcgcacaccaccacgcccagctaatttttgtattttagtagggatggggtttcaccatgttggtcaggctagtctcaaactcttgagctcaagtgatctgcctgcctcggcctctcaaagtgctgggattacaggcatgcgccaccgcgcccggccgtcggaaccattttcaagtgcacagatcagtggcatgaagcacattcccagtgctgtgcaatcaacaccatcagccacctccacaatgttctcatcttgcccaacagaaactctgtccttattccacagtaactcccggtctcccctctcccagtcctcggcacccagcattctaccctctgtctctatgaatcttactgaccaagggaccccatagaagtggaatcacatcacatttgtctttctgtgaccagcttatttcactgagcataatgtcctcaaagctcatcacttcacatgtcacgtatgtcagagtttccttccttttcaagtctgaatcataccccactgtatgtggtaccacaggggtaaacgcacacttggattgcttccaccttctggatctcgtgaataaataacgctgctgtgaacatagcatgcaagtatctcttcaagaccctgcttgcaattctttgggggtataaacccagaagtggaagtctgcattgcatcttatgggaactctagtttgtttatttatttatttattcgtttatttattgagacagagcttcgctctgtcacccagactggagcgcaatggcatgatctcagatcactgcaacctctgccttccaggttcaagcaatcctcatgccttagcctcccgagcggctgggacaggtgcccaccaccacgcctggctcatttttttgtatttttggtagtgacagggtttcaccgtgttggccaggctggtctgaaactcctaacctcaggtgatcacccatctgagcctctcaaagtgctgggattacaggtgagagccactgggcccggcctcgttttaactttttgaggaccctgcatgctgtttcccacagaggctgccctgtgttccattcccaccaacagtgtgtgtaaatgcctttgcaggaaatcagtatctcctgcatccctctgcttctctgcacctctctcctttcacctctctcgctggtctccagcttcctgagcaacctccgccatcactctgacctatttccagttcaggatccccatggccgctagagtgattgcatttcagatactgcatgtcggtgtgcctgctgtcttgcacgtaaagcccctcagtggcttcccattgctctaggatcagccccagatcctataggacccacctcagcccttcttccctcctggttcagctgaacatggccactcggttccacacacagtgaccacctgcctacccctccacggcccatacttccttctgtatcacacagagttccctggcaggggcactaccctcacagtctcacaccacttccctaatcaggcatcccttagacctcaaggaggagccccctgactctgtttaccatcccccccacctcaatcaagcaggtactcaagttactgctcctgctaaaaatgcgttccttggccggtcacggtggctgacgcctgtaaccccagcactttgggagtccgaggcaggtggatcatgaggtcaagagatcgagacaaccctggccaacctggtgaaaccccatctctactaaaaatacaaaaattacctgggcatggtggcacacacctgtagtaccagttacttgggaggctgaggcaggaggattgcttgaaccctggaggcagaggttgcagtgagccgagatcgcaccactgcactctagcttggcaacagagcgagactctgtctcaaaaaaaaaaaaaaaaaaaaaaaaaaaagctttccttgcctcccaaacacttatctctgcatgcacatattcaaggctgagagatgagattaatacctatttcagccccagactggagcgtgggtgtgcaggtcagggaagctcctgccttagacaggcccagtctctcgtttacacttgcacgtcaccatgcaccagtccctcaccggatgtatcacagctgtgacttgattttactttttctaggatgtgtctttgatttatgtctgcatctccccctcaactataagctccaccagggagggaactgtgtctcctttcccacccttaataattcgtaaatgagggaaatgtggaaactgcaccgcctttttaggggaacctgaactggcaatggaggaccaggctactgaagtccgaaagggatcccaatgatgcccacgtttgccactccctgttttcagctaagatttctctctggggcattctctcagatctgtcttagctggatctagcatattgaatgagtgaagggctccagaaagaaagagagataggctgggcgtggtggctcacgcctgtaacccagcatttggggaggctgaggtggcagactgcttgagccccaaagttgaacaccaacttgggcaatataatgagaccctgtctctataaaaaaattgaaaaaggccaggtgaggcggctcccgcctgcagccccagcactttaggaggtcgaggcaggtggatcacctgaggtcaggagtttgagaccagcttcaccaacatggttgaaaccccgtctctactaaaaatacaaaaattagctgggtgtggtggcagatgcctgtaatcccagcgacttgggaggctgaggcaggagaatcggttgcagtgagccgagactgcaccattacactccagcctgggtgacagattaagactctgccttaaaaaaaaaaaaaattaaaaattagtcgggcatggtggctcatagtcccagctacttgggagggtgaggtgggaaaatcacctgagccctgaaggttgaggctgcagtgagctatgattgtaccactgcactccagcctgggtgacagagtgagaccctgtctcaaaagaaaaagacaagaaagagagagaaggaaggaagggagggagggagggaaagaaaggaaggaaggaaggaaggaaggaaggaaggaaggaaggaaggaaggaaggaaggcaggcaggcggccgggcacggtggctcccgcctgtaatcccaggactttgggaggctgaggcgggcagatcacctgaggtcgggttttcaggactagtctgaccaacacggagaaaccccatctctactaaaaaaatacaaaatgagccgggcctggtggtacatgactgtaatcccagctacttgggaggctgaggcaggagaattgcttgaatccagggggtggaggttgcgttgagtcgagattgcgccattgcactacagcctgggcaacaagagcgaaactccgtctcaaaaaaaaaaaaaaagaaggaaggaaggaagggaagaaagaaaggaaggaaggaaggaaaggaggaaggaaggaaggaaggaaaggaaggaaggaaatggagggaggaagggagggagggaaggaaggaaaggaaggaaggaaggaaaggaaagnnnnnnnnnnnnnnnnnnnnnnnnnnnnnnnnnnnnnnnnnnnnnnnnnnnnnnnnnnnnnnnnnnnnnnnnnnnnnnnnnnnnnnnnnnnnnnnnnnnnnnnnnnnnnnnnnnnnnnnnnnnnnnnnnnnnnnnnnnnnnnnnnnnnnnnnnnnnnnnnnnnnnnnnnnnnnnnnnnnnnnnnnnnnnnnnnnnnnnnnnnnnnnnnnnnnnnnnnnnnnnnnnnnnnnnnnnnnnnnnnnnnnnnnnnnnnnnnnnnnnnnnnnnnnnnnnnnnnnnnnnnnnnnnnnnnnnnnnnnnnnnnnnnnnnnnnnnnnnnnnnnnnnnnnnnnnnnnnnnnnnnnnnnnnnnnnnnnnnnnnnnnnnnnnnnnnnnnnnnnnnnnnnnnnnnnnnnnnnnnnnnnnnnnnnnnnnnnnnnnnnnnnnnnnnnnnnnnnnnnnnnnnnnnnnnnnnnnnnnnnnnnnnnnnnnnnnnnnnnnnnnnnnnnnnnnnnnnnnnnnnnnnnnnnnnnnnnnnnnnnnnnnnnnnnnnnnnnnnnnnnnnnnnnnnnnnnnnnnnnnnnnnnnnnnnnnnnnnnnnnnnnnnnnnnnnnnnnnnnnnnnnnnnnnnnnnnnnnnnnnnnnnnnnnnnnnnnnnnnnnnnnnnnnnnnnnnnnnnnnnnnnnnnnnnnnnnnnnnnnnnnnnnnnnnnnnnnnnnnnnnnnnnnnnnnnnnnnnnnnnnnnnnnnnnnnnnnnnnnnnnnnnnnnnnnnnnnnnnnnnnnnnnnnnnnnnnnnnnnnnnnnnnnnnnnnnnnnnnnnnnnnnnnnnnnnnnnnnnnnnnnnnnnnnnnnnnnnnnnnnnnnnnnnnnnnnnnnnnnnnnnnnnnnnnnnnnnnnnnnnnnnnnnnnnnnnnnnnnnnnnnnnnnnnnnnnnnnnnnnnnnnnnnnnnnnnnnnnnnnnnnnnnnnnnnnnnnnnnnnnnnnnnnnnnnnnnnnnnnnnnnnnnnnnnnnnnnnnnnnnnnnnnnnnnnnnnnnnnnnnnnnnnnnnnnnnnnnnnnnnnnnnnnnnnnnnnnnnnnnnnnnnnnnnnnnnnnnnnnnnnnnnnnnnnnnnnnnnnnnnnnnnnnnnnnnnnnnnnnnnnnnnnnnnnnnnnnnnnnnnnnnnnnnnnnnnnnnnnnnnnnnnnnnnnnnnnnnnnnnnnnnnnnnnnnnnnnnnnnnnnnnnnnnnnnnnnnnnnnnnnnnnnnnnnnnnnnnnnnnnnnnnnnnnnnnnnnnnnnnnnnnnnnnnnnnnnnnnnnnnnnnnnnnnnnnnnnnnnnnnnnnnnncccccgccggcccccgcgcagccccagcctccgcccgggccgccgcagccgccgccaccgccgctgcctccgggcgcgatcgcgggcgcgggctcctccgggggctcctccggggtatccggggactccgcggtcgcgggcgcggcgccggccctggtggccgcggcggccgcctcggtacggcagagcccggggccggcgctggcgcggctggagggccgcgagttcgagttcctcatgcgccagcccagcgtcaccatcggccgcaactcgtcgcagggctcggtggacttgagcatgggcctgtccagcttcatctcgcggcgccacctgcagctcagcttccaggagccgcacttctacctgcgctgcctcggcaagaacggcgtcttcgtggacggggccttccagagacgcggcgcgcccgccctgcagctgcccaagcagtgagtggccccgcgacccccgccgcccgcacccggggctcgcccacgacctcgatctctgaggcccggcctggggatccccctccagcttcctcggcctcgacccccaccccccggcccacccccggtaacccccgaccggcctggactccggggtcaaccccgacccccgcctcctggctccctaggatcaccccgaccccgatcctggaggctccagcctgaggatctcctccactttccccggtctggataccccgtcgcccccgacccccaccggcctggactctggggtcagccctgacccacaccttgcggctcctggggtcacccctgacctcatctcccaccggcctgggctcctggagccacccataccccaagcccatctggctgggcctcttagacccctgacccagatccctgctgctccccagctcccatcggcctggactccggggtcattctgaactcccactggcctggatccctggggtcatctacgtccctaccctgcctaaacacgcaaggttaaccgcgacccccacttcctaggcccccccggagtcacccctgaccgctaaccccacaagcctgggctcgcagggccactcccaccccagctccacccagctgggttactgaggtcaccttgaccccagtccctgctgcctgggcctggggatcaccctcaacccttccaggtcaccctggacccccaccagcttggactccagggtcaccccagcctgacctggttctcaggaccacccccgacccccaccagccagggcctcaagtcaccccagtgcctgatgcctgccgtcctggaccccagtggctacccctgaccctgtctggtctggacccttgggccacccccaccccatccagtctgggtcctgggggaccccaacacactcacccaggacagtgggagggtgttgctccgggaagtgcgaggtccctaggagtgtgggctgtgctgaaggagcagaggcctggcggggaggggcgaggacaggaagcctgtgcctcagtttacatccccaactagtgctccttggatggagtagcgggaccccaagatcaaattagattcccccgggcccgaggtcaccagggcagagagacccagctgggcctggacggctgcccaggcctgtcggtgcctttcgtagcatcccgtggtcacctcccgcccattccggttccctcctttccagctccactgccctccgcaccctctgctctgccccggacctcaaggtctgttgatcaggagaaagcctgtttaattactcatttcctctggagccactttctttttctatttagtgattgcctctaactcatcaccagtgtttatatttcttcaatgtggttcttgttcagggttgtctgtctaattactcccttttataaacgccttgcgtctggggaatttttgctggggtaattcccagggcccaaagtttgtgtctgtaaacttctccccttttttagtcttggcatgtttggttacagatatcgcattgaataatttaaaatgcaacatcaacaatgactcactcccccttggggcgtgagaggggaagtatacctttttctaaccgtgctgaaaggtgtgcattttggtaaaatcagaactcaggagataacaaatttgttctttgcctcagatattagtgtgttctctctcttccataaccaatacactctctccgtttggggccattaaatgcatttcctggccactctcccctccagtaagaaaatgacaggtaggctccccaggccccccttagaggcctgctttacagacgcacctttatataactcaggttcactaagtacttccattaaagtcttgttttcaggtttcctgcccctgccgtggaaacaggtgcactcctgagtcaggcccagctttagtgaatcttgaaggaggctttcacggtattttttttttgtaattcaaggggaaaaaatttcaacctcagatcgtctacgaataggccagtagcaagcctgttatttatgaaatgttatcggtgtatacagtccttgcacatttatgctccagggagctcgtgttctcggtgggtgcattaccaggcattgtggtggggctgtcaggctacacagatgcccgcccgctgacttggtgcattagatgtgcgtgaagtgcttggcccactgcgcctgtctgtttttatttgacttcacctgcacatgtgagcaatatctatgtaggcagcaatgtaaaatttacaagaacaaagcaaatgtgcagaaggaaaaacattaagtggatgtccatgtccaccctcctagaaaagagctatttgctttttttttttttttttttctgtcatggagtctcgctctgttgtccagactggagtgcagtggctcactgcaaactctacctcccgggttcaagagattctcctgcctcagcctcctgagtggctgggactacaggcgcacaacaccacgcccagctaattctttgtatttttagtagagatggggtttcaccgtgttagccaagatggtctcgatctcctgacctcgtgatctgcctgccttagcttcccaaagtgctgggattacaggcatacaggcgtgagcccctgcgcccggcctcactttttttttttttttttttaattttagaaaacttacacctaagtagtcacatatgtagaacaggctgtcataaacttttttggttaggtaaagattcttaagcctggactacatttggttaggtaaagattcttaagcctggactacagcctcacgcctgtaatctcagcactttgggaggccaaggcgggtggatcacttgagttcaggagttcaagaccaccctggccaatgtggcaaaaccctgtctctactaaaaatacaaaaattagcttggcgtggtggatcacgcctgtagtcccagctacttgggaggctgagacagaagaatcgcttgaacccgggaggtggaggttgcagtgagctgagatcacgccactgcactccagcctgggcaacagagcaagactccatctcaataaaaaacaaaatgaaaaaaaaaaaaccaaaaaacgattcttaagcctattatgttgaaagtcattaagaaattttaaggatttcagcgcaaggaagttagatgcgtaagtttttgtcaccctgaatgggaaattcatcaccgaatgtcaggaattactgtgtctgttttctctccggctttggtacctggtattgccactgctactggaaattgtgaatttgtttactgtaaactacagattctcttgctgtgttggaatgtgattgccttggacgtgcttggatttggtgggaggtctatgttgtgttggtgcccacaccattttccaaagctgtgttgtccggggccaccctcttcaccttgggacaggtacatgccacacacacttccagtagagctcccactcaggaaggatgccagaattcaacccctatttgttactggaagtacgtaattccaaatcttcaatatttttaattattggtgggggaaaaaaaagacttgtgacccagcttagagctgatcttgctctactgggtgacactacgcctggtgggtaagcatctcgccagagctcccaggcacagggggagtgtgcgtgggttctgattcagctttgcttggtgttgacttggaggaactgcccgggtctccgtgatagcgtttcttctagaccataagctccctgtggctggggccgagaatttatgatgtttcaccagagacctagtgcaggcactggctcctattaggtatgcaacaactgggttctgtttgttgagtgaacaaattaatgaccacatgaatttgcagcttctgtaggagaaaaacggcgtcatcgatttagtctggtgtcctaaaaggaccatgagcctgtcatgggggggaattcagacagccttcttcggttatggggaggggggtgaggtgtgtgtgtgcacatgtgtgtgtgtgctgtcattcttgatgccacttaattttttttcttttctttttttttttttgagacagagtcttgctctgtcaccgaggctggagtgcagtggcgcgaacttggctcaccgcaagctccgcctcccgggttcacaccattctcctgcctcagcctcccgagtacctgggactatgggcacctgccagcatgcccagctaattttttgtatttttagtagagacggggtttcaccgtgttagccaggatggtctggatctcctgacctcatgatccaccctcctcggccttccaaagtgctgggattacaggcgtgagccaccacgcccggccttttttttcctttttacatagttaatgtatccaactgaattcttggtttgtttgttttcgttttcgtttttgtttttttgcaacggagtctcactctgttgcccgggctggagtgcaggggtgtgatctcagctcactgaaacctccgcctcccaggttcaagcgattctcctgcctcagccacctgagtagctgggattacaggcgcacgtcaccacgcctggctaatttttgtatttctaggagagacggggtttcaccacgttggccaggctggtctggaactcctgacctcaggtgatccacccgccttggcctctcaaaagtgctaggatgacaggcgtgagctactacgcccggccccaactgaattcttgatgccacttaattttgaatttcatttacccaattcaaaattcaaaaaatttgttttcctcatgaacctgagaccctgtgcatatcccatacttgctcttccctctttctctaaagccttttcgcccagtatttttatagtaaatgtggatggcttgaataattacaatgagaacaagacttctgtttgtggtaactttgagtggtaagattcatatgggtgtctttttttctttatacttttctgtgttttccatgttttctgaagtgaatgtggttactttttaaaattattttttaattttgtagagacagggtctcaaccatgttgcccaggttagtctggaactcctgctctcaaacgatcctcccaccttggcctcctaaagtgttgggattacaggcatgagccaccatgcccagctgcttttttaaatacatactttttatcatggacaatttcaaacatagacatagagtaacaagcttccacatggctgtggccggcttcagcagctatcatcttgtggccaggcttgttttatcttcacccccattcacctttccccctcgccccagttctttagaagcaaatcacagatgtcatcttactttgtctataaatatttcaaccaaaatttctagaagataagaattcttaaaaaaaaaaaaaaaaccacagtgtcattatcacacctaaaaaatgaataataatttcttactgtcctcaaataatcagtgcataggtttctcttactgtcggcatggttgttttttcttttcttttcttttttttatttttatttttttttgagacggagtctcgctctgtcgcccaggctggagtgcagtggcactatcttggctcactgcaacctcccaggttcaagcgattccccctgcctcagcctcccaagtagctgggattacaggcgctcgccacgacacctggctaatttttagtagagatatggtttcaccatgttggccaggctggtctcgaagtcctgtctccagtgatctgcccgcctcagcctctcaaagtgttgagattgcagcccccacgcccggcaccctctgcttttttctcatggagtcacttgtcctgtgtagttccccacacctgcctttacagattggattctgccagcatccattcactgtgtccctcccccttgtcattcctgtaaactggttactagacccggggattccatcagactcaagtgttttgttttgcttttttgccagaactgccttctaggtggtggtgcacgcagaggtgaaaatgtctgggtgtcccccacaatttgtaacattagcagcttttggtggtcattgccttggatcccttaatttgttctcacctgcacttttttttttttttgagatggagtttcactcttgtcacccaggctggagtgcagtggcaccatcttggctcattgcaaccccctgcctcccaggttcaagcaattctcctgcctcagcctcctgagtagctgggattacaggcatccaccaccacgcctggctaatttttgtatttttagtagagagggggtttcgccgtgttgcccaggccagtcttgaactcctgacctcaggtgatccgcccacctcagcctcccagagtgccgggattgcagatgtgagccactgcacccggccaccggtacttttttgtggttcattttggctgccagcatcggatacgtggctgggttgccatgctccatctgctgagaggcgtattgtgagtggcaggtgttatggatcacagcctctgcatatgtgccagcagaaaaagtaattgtaaccagcaaagcattttactacataaacgttttagcccctataaaaacatccggagatccttttgttgttcatgagcatgacaattgggtgttttcatgcagcgagtgagatgtgccaccctggaaccttgttacgacgtcgcatgttacctgtctgacctgaaaaataattaataagtaaaacatacggaagccagtttctcatggctatttccaactagtcacttgaagaatatggaattagttatacaattagttatacgttgtataaccatcataaaattagttacagattgatgtgacattatcttgaaattaatgggaaaagtgccccagacctggggaagtcgaatgccccactacgtggcatcaaggacagtgacggcattcctcttctcctggggttttcccacccttgtcactgccctcacccagtccccttaggtgacccagcgcctgggtgggtcacgcttggctggtgcaggagtgggcgtatgtgctgagctgggctttgcacttgggacaagaaagggtgtcagatcagtctctttccagcgagtagacgtgaaaactcaggtggtgctgtctcgcttctccacgtgaaggatcagcctgcagtgccaaaggcgaagggaagagctgtgattagggagggttggtctgttagtgaaggaagccacagaggagacaaagacgggcatcaggtccgactcctgagacctggtggccccaggactggagaggagcagatccaggtgcaggatctgctgaaggaaggaatgttcccgttgggtgatggttttgaaccggagctggggagaacaatcactgctgcagaggttggagggggagccgcttcgcggaacggggtgaagctttagtttcagtccggttgtatcttgatagccaagaaatgaaatgcggcatctccaaataaaggctttattcttagtgttttgctagttggcagtttttgtgtatcacatatatttgttccaagttagactgtcaactggttaaagttactttaaaaagctttgtgggcaagtagcaagtacattgggtcgagttaaaactatgagccactttctagtatttggtgtacgctgaattttttgggcttgccgcccatttaagaaaacttacatagaattttaaaagtcagtctatgaggagggtgttgtcgtgtagtattattgaactgaatttagaatatttgcatgaaagcctttgtcatactgatggagaaaaagggtttgtgggtgctaaaagtgtaggatgtagtggtgttcatatttagtacttttgaaaaagacgcagctatgtttaaaattttgtgctgaaatgagactaaagcatttgatttggagatagagtaatttacgatttgctgtttttgcatcttgtgaatgtcagaggataaacttgctaaattaatgacaactcaaattgcagcaatgcctcatttccataattaccctacatttaaagcatttcatattaaaatgagaggattatataaaatgcttttagtttgatttcctggaaataggcccctgcatcgtgacttgttgggcgatcttgtacttaattttcattgcgactattacttttcacgagtttctagtttcctggtaaaatgttgccgggtaattaaaaaggataaaaaacagaatgtgcgtaaccaagaaggcgtgtggcgtgctgccaggaatcggaggaaccagggttcaagaactcgcctcacctgacccatttctacagtgttgatgatgtatgttttcctcggatgctgtgaagatgagtttgggcatgttttgctttacttaaacataacagtttcatcattaaatcatgaactgcttgcaaagcgtagcttttctctcctaagaatacttttcaggaagtagacaaactgatcaatagacatacagagagcctccctctgtctcccaggctggagtgcagtggtgcaatctcagctcactgcagcctccgcctcctgggttcaggcgattctcctgccccagcctcccgagtagctggagttacaggtgcctgccaccacgcccagctaatttttgtatttttagtggagacgggggttttactgtgtcggccaggctggtcttgaactcttgacctcaaatgatccacccacctcggcctcccaaagtgctgggatttcaggcatgagccaccacgcccagcccaggccattatacatgatttgattaagaagaatctcgtctgccctcagtactgcatttaaccttgctgggaaaggggtgaactgtcttccatctgtttcctcagaggacgctgagctctgatcatgttgcctctctgcccagaaacctcagtggctcccgtgtacccagggcaagaggccctgcccctcagcagagaccctgttattatgaagctgtcctctaacctgttcccctaagtgtcaaagggcatggttctctttgggcagaatggctgctggacattctctgcttataccagcaattcccagatttgttttagtctcagggcccttttatactcttatactcctacacattactggggaccccaaagagctttggtttatatgagctatatctgttgacactgaccgtattagaaattaaaatatgcatatttatttatctactcaaaaatggtaataataactctatttcaaaaatatttttatgaaaaaaaaactatatacccccaccccaagaaaagaataagagtttttttggtagaactctgtaatgtctggcttaatagaagacagctggaatccatggctgcctccgcttttagtcggctgtgatgcgtgttcaggctgaagtacatggagaaaagccagcctcctgcagatacgtagttggaaaagggagtatttttgtagccttttcagatattgtggatgttccttgagacctcactaaaacctgacaaggggtagtttctttttttgttgttttgttttgagacggagttttgctctgttgcccaggctggaggggcagtggcacgatctcagctcactgcaacatccgcctcctgggttcaagcaattctcctgcctcagcctcccgagtagctgggataaacaggcatgtgccaccacgcccagctaattttgtatttttagtagagacagggtttcatcatgtaagccagctggtctcgaactcctaacctcaggtcatccttctgacctcaggtgatccgcctgcctcagccacccaaagtgctgggattacaggcttgagccaccgcacccggctgggtagtttctttttttttatttatttttttgagacagtgtcttgctctgtcacccaggctagagtgcagtggtgcaatcatagctcactgcagccttgacctcctgggctcaagcagtcctcctgcctcagcctcccaagtagctgggaccacaggtgagcaccaccagaccagctaatttcttttatttatttatttatttttggttgagatggggtcttgccgcgtttccctgactggtctcaaactcctggccttaagtcatcctctgctataatatccttaagtcatcctctgctataatatccttaagtcatcctctgctataatatccgtagatgttttatactgtgttacgttaaaacctattgctctttcattttgaatgagtcctttgccacccctgtgtgattttgtaacatcatacattggccattggcaagaatattgattgagttatgcagatcttctaatgttaattataaaaaacaaagtctgttttatcctgaggttcagctgatagttaaacttgatcccttcgaacccaataaactctgtttttaaaaacagaaatcttttataggaacaggctttttgtagtcagttaatttttaaagctgttttaaaagttgagtgacacagcatattttaaatagactttttatagagcagttttaggttcacagcaaaagcatatttttatagaaataaagttatataatttagtcattggccttattagcatgttgtgatatgacttggctacagttagtatatttttttaaatgtacagtaattttttgatgatttagggtggcacgattcatcctgttagttactgccgttattttccctgggggcctctgtcgcccaagccgctctctgatggtgcccttggcctttcagccacggatatgggtgtcccctcccctggagaacagcagagtgatgggggaggtgggacagggttggggtgtcccaggtgagtcctggagtaaagtcagtaacagaatttgtcttgtttttttgtttgattttgaggcggtcttgttctgttgcccaggctggccttgaactcctaggctcaagtgatcctctagcctctgcctcccagtgtgctcaggtgtgagccacctcatctggcttcaaataatctctttaaaaaaataacaaaagttttttttctgtagagacaaggggttgttgcccaggctggagtacagtggcatgatcacagctcactgtagcctctaattcctgggctcaaacgatcctcctgcctcagccttctgagtagctgatactacagtgcctacttccatgcctggctaattttctttttattattttttatagagaccagtgtctcactatgttgcccaggctggtcttgaactcctgggctcacatgatcctcccacctgggcttcccaaaatgctgggattataggcctgagccacgcgcccagccagaatgtgtttgtatggagacattgttgtgtgggatttttcatgaaacttttctaggtttttttttgttttattttattttttactttggaacatttacatcaaaataagcagactttctgaaaaactatgccactttggataaacataaaaattcattttctccctccccagtctgataggaactcttggaggaaatttctctctctttcccttctcactataaatcacagcaaatcagcagtacacagagaataaaagcaatcttctgcctgttctgaaaaagctttgcttcttgtgatttgtatcacgagggggaaaggtccttactgtttttccagacctacagttgtgatagaggctcctcccagccccgcccacagaccccaacagtgccctctctcacaaatggattctggggcttggtctttatttttgtttttgttgggggcagcatatggaacccaaaaatagtatcatagcctagatttggagctttgtgccagccttgtctgtaggatgacccgtgtgggtctcacctggtgactgggagtccacaggggtcagttagtagcagggagctgcagggcgcctgtcagcagagaccgtctcattccccaaacccaggagccagaggaactgacgcccggataaatgcccaagccgccccgggtgggattagtcgtctaccttcccagaaatacaccctcccatcctgtgacttggatacagtttactgatgaaattagggaacctcctgcgccttaccaagaagctgtggctggaacttagtcaatgaaaaatgatttgtaaactctttggagctggctttgaaagaatgtttaaaatgatagctgatactgccagacaacagaacaggccggccttagccatgaggctccagaagaaggagaactgcaaagtttgtgtccgctacctctgcccttgggatggagccattctgtctgcttggctgtacagccctggcattgggaacagtgattcatcgccgcttgatgaaaacatctttccgttaagaatatccacctccctcgggttggagtccatattaaccagggaacacttgcagccctaatttggttcctaacctgcaagaagattttgctagaatatccagcttcctttgcaattctctttttctctgtaaattgtggtgtggacagattttacaggcctgcctacctttggattggccaatcagggatgccatggcgagtctagaacttcctgtggtggtagaaatgttttatatctgtgctgtccaacatggccaccactaggcatgtgtggctgttgagtgtttgaaatgtggctcaaggcggggcgcggtggctcatgcctgtaatcacagcactttgggaggccagggtgagaggatcacaggtcaggagttcgacaccaccctggccaacatggcgaagccccgtctctactaaaaatacaaaaattagccaggcgtggtggctcacgcctgtaatcccagcactttgggaggccaatgtgggaggatcacctgaggtcgggagttcgagaccagcctgaccaacgtggagaaaccccgtctctactaaaaatacaaaattagctgggcgtggtggcgcatgcctgtaatcccagctacttgggaggctgaggcaggagaattgcttgaatccaggagggagagattgcggtgagccgagatggtgccattgcactccagtctgggcaacaagagcgaaactccgtctcaaaaaaaaaaaaaaaaaattcccacaaaaattagctgggtgtggtggcgtgcacctgcaatcccaactacttaggaacctgaggcaggagaatctcttgaacccaggaggtggaggctgtagtgagctaaggatgcaccactgcactccagcctgggcgacagagcaagactgtgtctcaaaaaaaaaaaaaaaaaaagaatcttgtgctgagtctgacccctgacatacattaggaggggaggcttccatttgtccctgtcttaactctccttcttgaagccaaaggaaagacgcaaatcatctaggagattctgatggataataaagaagagggacaagcttgctgatgtaggggaaataaatcgccgaggctctgtctagcttggatttactgtgtgtattggctgtgggtggattacaggtgagctcataaatattagtattttgctcatgtccttccagatttgtaatttccttgataagcaggtgtgtgcgcgtgacatgtctgtcgtctacccgtcacacggttgtaccaggtagcctttgcttaataagccctcggagtactcgtcctttgagctcgtgggacttgcggggtggtcattaagcgttggtgtgaataccgggtatctccgtctcccagaagctgcgagtccctcgagggcaggggctggttctttcgggaggcattttgttctcagtgcctcgcccagtgccagtgaagacacacttccaggtgtcatctgctataacctgctagcccttctaatagataaaccccaaaaccttgcctatggaaagtccacagtagatgtttctgaatggtgggcagaaaatgcctccttcgggccaggtgctgtggctcacgcctgtaatcctaacactttgggaggctgaggtgggtggatcacttgaggccaggagttcgagaccagcctggccaacatggtgaaaccccatctctactaaaaatacaaaaattagccaggcatggtggtgtgctcctgtagtcccagctacacgggagacagaggcaggagaatcccttgaacccgggaggcggaggttgcagtgagccgagatcatcctgccaccgcactccagcctgggcgacagagcgagactgtctcaataagcaaaaaaaagaaaatgcctcccttaaggtgtgattcagggacccaggctggcactgtctggagtccagcggcctgggcacggctgcacctgctgcagtgctgtctgcatctggaggaaaagagggaggctcaggggaggccaggcccagaagtagcatatctcacttccactcaagccagtgaccagagctcagtctccggccactccaagggaaggcaacgtgctcaggaagaagatgacagtggcctgctgaacagctagccggtattcacggccaacttttcagatcagggtagccagctgcagcctgtgggccagaccctgccagctgcctgtgtttgtaaataaagttttattggaacacaccaggcacatttgttaagtgctgtctgtggctgctgagctgagccggagaccatgtggaccccagagcctgtgttatttccttctggccatgcctggtggcccgtctgcacacccctgccttaggccacagacttctactcttccacatcagtgcgtttacctgggttcatcagcaccttttattaccaatttctctccacatttcttgtcaggttgaatcctgggttttgggaatatgaataggatctttttttcttattattttctaaaggttagtgtttacatacaggaaagataggctgtgtgtgtgtgtgtgtgtgtgtgtgtgtgtgtgtgtgtgtgtttctttggtatgagttttatagtaactaatttttttttcttttttttattttgagatggagtctcgctctgtcatccagactggagtgcagtggcgtgatctcagctcactgtaacctccacttcctgggttcaagtgattctcttgcctcagcctcccgagtagctgggattacaagggtgcgccatcatgcctggctaatttttgtatttttagtagagatggggtttcaccatgttggccaggctggccttgaactcctgacctcaagtgatcctcctgccttggcctcccaaagtgctgggactacaggcgagagccactgtgcccagccctaatttgttattaaaattttacgttttgaaaaagttgcacgcctccaaaaatgttgcaagatgagtccaaataactcctgcatgtcctctgcccagatttgttcatttttagtgctctgccatgtttagcgttttctctatatatgtatgttatctgagagtgcgattttatatatgtatgtgtgtgtatatatatatatatatatcgtgccctttttcttaataccacaacatgcattgcctaagaataaggattttttttttctcgcttcaccatatgcaagaataaagatattttattcacacctaccccaggacacccaaaaatggggtggaggatattttacataatcacagtctgttattaaatttaggaacattaatgatgatcccatatgattagctcatgtgcagtccacgtacctctttgttgttgttgttgtttgagatagggactccctgtgccacccaggccggagtacagtggcacagtcatagctcactgcagcctcgacctcccaggctcaagtgatcctcccacctcagcctcctgagtggctgggactacaggcacgtgccaccacgccctgctaatttttttgtgtgtttctagaaatggggtttcaccatgttacccaggctggtctcaaactcctgagctcaggtgatcctcccaccttagtcttccaagtaactggaactataggcctgcgttaccatgcccagctagctttttattttttatggagatggggtcttgctgtgttgcccaggctggtctcaaactcctaggctcaaatgatccacccacctcggcctctcaaagtgctggtgttacaggcgtgcaccactgtgcccggcccacataccatttttgccatttgtcccagtatcgcccagtgcagtgctttgtcgcttgctggggctccagcccaggatggagtttggcatgctgttgtcctgtgtttttagtcatctgaatctgggacagttcatcagcccttctttgtcattactgaccttgacatttttaaaaacaggccagttatgttctgggctggctctccacatacatttgtccgatttgacaaaatcccaacttcactcaggtggagcatctttggccgtgggactcgtggggtccttatccacagggttagtttttttttttttttttgagacagtctcactctgtcacccaggctggagtgcagtgacacgactcgtggggtccttatccacagggttaggtttttttttttttgagacatctcactctgtcacccaggccggagtgcagtgacacgatctcggctcactgcagcgtctgcctcccaggtcaagcgattgtcctgtgtcagcctcccgagtagctgggattacaggtgcccaccaccatgctgggctaatttttgtatttttagtagagacagggtttcaccatgttggccaggctggtctcgaactcctggcctcaagtgatccacccacctcaggcttccacagtgccgggattacaggcatgagccaccgcacctggcctcacagggttagttttgatcacttggtttaggtgttgtctggccggcttttccaccaaagagttgctgtgttttttcttttgtaattaagtaatttttgagattcagtacaagtgttaaaatattaattttctgtctagtcacatttacatttctggtaacagttttttaattcatgtgcttgcgtttcctgggccataatcctcatgtgcagataatacttcttctctttgttccagtatcttagatctcatttctttgtgttgtctggttgaatcggctaggacctccaaataacattgaccgagtaccatgataatgggctccttcttgttcctagcttggaaagaaacgcctgtgaagcgtttcagagtaaatattgctctgcctgcctgagagccatttccgtcaggaggccttccccggtgcctggctgagcttaggtcccactggcttgcactgcagcaccccacggcaccctgtgtggcctgtcgttgtttgtggttatatttatctgagacacctgagttttgttggggcaggaccacgtttttcttgtttattgcatagcctcagtacataccaatatgcttggcacatagttggcactttgtaaatatttgtgggcaaaatgaataaacaaataggagagatctgaatgcaaaaataacctggtgtaagaaagtgatcagaagttccattagcttagcttctaaaggtctggcttttgctgagtgcccttgggcaagtggattgaccccgagctcctgtttgcccatctgtaaagtgggcacacttcctttttcataagtaattgtgagaattactagagatacattagaagtatttactgggccagatgtggtggctcagtgggattacacctgtagtcccctcccagcactttgggaggccgaggtgggaggatcgcttgaagccaggtgttgaagaccagcctgggcaacatggtgaaaccccgtctctacaaaaattacaaaaattagccaggtgtggtatcatgcacctgtggtacgagctactcgggaggctgagggggaaggatcccttgagccccagaaggtcaaggctgcagtgagctataatcgcaccactacactgcagcctgggcaacagagcaagaccctgtctcaaaaaacaaacaaacaagtacttacctcagtgcctggcacatagacagtgctgatagataaacatcccacatacatgcgtctgtgctgccatcatcgctgctgttactgtcaaggatgtattattcatcctgtgatgtcagaagcggaggttgttgcagggcagtgggaaatgactgcagtgctttgagctgctcacagtggagcagactggccctcaggtctgctgagctccctgccccagcctgttccagcaggggcggccgctcaccagcaaggctgtcattcctaggcagcatcttgcactggctggagaacgggcttcctatctccaagctccctgcggctgtgaaggctgcacgatcagagctaaacagcaggggtttgttttcttgtgtttttctgagctgcttatctagagaatgggagctcaaaggacggggggctagaagagacaaactcaggttttaccttgaattagtttgagtaacgtttgttgggtacagagactggccaaaacttagggaggacactgagataagaaggtttgatctcaaaacagttcccagttttagccaccgtgcccagccaattcgtatgtattttaaggtatttttttaaatgtggaaaagtacaaaggatatgtaacaagtactattgaccgggcgtggtggctcacaccagtaatcccaacactttgggagactgaggtgggaggatcccttgagctcaggagttcgggaccagtctgggcgacatagcaagattctgtccctgcaaaaaataaaaagtaaaaggccaggcgcagtggctcacgcctgtaatcccagcactttgggaggtcgaggcgggcggattatgagggtcaggagatcaagaccatcctggctaacacggtgaaaccgtgtctctactaaaaatacaaaaaattagccaggcatggtggcgggcgcctgtagtcccagctactcgggaggctgaggcaggagaatggtgggaacctgggaggcggagtttgcagtgagcggagatcgcgccactgcactccagcctgggcgataagcgagactccgtctcaaaaaataaatataaataaataaaaagtaaaaaattatctgggcatggtggtgcttgcctgtactcgcagctacttgggaggctgaggtgagaagatcgcctgagcctgggaggttgaggctgcggtgagctgtgactgtaccactgcactccagcctaggcaacagagcaagaccctgtctcaaaaaaaaccccaaaaagcaacaacaacaaaaccaaatcgtattgtacccactaagaatccgtgcttttcatattttgtcatgtttttaagccctttttaaagagacacatgacagataaaattgaggtcccctgtcctccaccttcccctcccgtttctgtcccttctccagaggcagctcctggaggaatttaaccctagacctcccgcgtatgtcacatacacacgtagacatctaagaggcatttgttgtttgtggggtttttttatttatttattttttttgagatagagtctcactctgtcgcccaggctgtagtgcaatggtgcaatcttggctcgctgcaacctctacctccctggttcaagtgattctcctgcctcagcctccggagtagctgggattacaggcacgcgccaccatgcctggctaatttttttgtatttttagtagagacagggtttcaccatgttggccaggctggtctcaaactcctgacctcaggtgatcccaccggccttggcctcccaaagtgctgggattacaggcatgagccaccgcacccggccagcattcattgtttagttcacgcgagttttcaggtttgcgttagtggtgtcgtgacatcttcttcatgatcctgtttgtgttttccacttctctggaaagaccgcttcataggttggtgccatcagacatgcgtaaccctagtgggtgtagccccccatcctggacggggccttgacggggcctctggcctcctcccctgccttcctcttctcagctctgaccagaggggatggaagcttgtgtccctctgggtgacagacccagcctgcccgccctacccagctcgggttctgggttcctttgtcctcgtccccagggctgcgtgtcctgctcgtcctcctgagctcctggcctgtgtctccacctaaaaggccgtcctcagctccccctgccaggtccggttggggaccgagacccctggttgcttgcactgctgggtgagagtgcctctgtgtcgggggctgggctgggctgggctggactgggaagactggctctctcaggggattccagggcaggcggctgggagggcgtttctgaggaagtgctgttttagccgaggtctaagttacaggcaggagctggcaatgaggagtcagggagacagacctccagccattgggcctctccgctctggggtgaggggagggagggggaggacccgagggggcagagcatttaggacatggagtgggtagggcgttgtgacagcctggctctcaggggatgggaggacaactcgctgaagttcgtggccccaagacatgcggagaacccgcgtctgcagggctggtggcgtccagcacagggcagggtcctggtgtcctcgccccacaaggctcccccagggtggcccgaccctgctgcgcgggagggaaagagccacaacaagttgaaggtgcccaggagacttgggtacattttgctcatcttagggttggggacagaacatcattaagaattgtttttatatctggcaaaactaaaagcttgaatattaaaaccaaatgatcccgggtagagctgcagctggggactggtgcgccatgcaattgacatagcgctgctcgggcgaccaggaggcccttcagtgctccggaggcactttcagagcatcgtgactagataaaagtaggtgaaaagggaatcgcagcctgccgagagctttagagagactcccctaaccatgatttaatctggggaagggagaaaagtaacatatggcagtcacattacattatgaccatgaaggctaaatactcccagtcactataaatacagaaaaccaaacctggtgggaaaaaatgcgtgtatacgtacccctacgtgtggaaaactggctaccgcatgcttaacaaaataacttgggaatgaattactcatggtgaggcttccgatcagtgtctaaccctggtagcgtctgccagtagccacaccgaaagggtctaccaagggtacactatggacatttttcatttaaaggtgaaagattttttaaaatgcattgctaagaaacatccctggccgggcgtggtggcgcacacctgtaattccagcactttgggaggctgaggcaggtggatcacttgaggtcaggagtttgagaccagcctggccaatgtggtaaaacctcgtttctactaaaaacacaaaaattagtcgggcgtagtggggcacgcctgtaatcccagctactcgggtggctgaggcaggagaatcacttgaactcagaaggtgaagattgtagtgagctgagatcacgccactgcactccagcctgggcaacagagtgagactctgtctcaaaaaaaaaaaaaaaaaagaaaagaaaaggaaacattcctttcatcaaaacacaaataaatatttttcaaaaattaaaaaaaaaaatgctcaaaggattaccgggtactttgtgaataaatgttttccctatttcggaactggataagctaagctgggatccacgcagcacgcagcaggagggattgccctgtgtgctaggcaaggctgacatcagtgacagcagcgtcaggctgtgctcggatcacgggcccatctgtagttatactttttaaattttttttcttctgttgtttctgtagagatagaacctcactgtgttgcccaggctggtctcaaactcctggcctcgagccagcctcccaaaccaatctatgtttcattctttttttttttttttgagaaaaagtctggctctgtcacccaggctggagtgcagtggcatgaactcagctcactgcaacctccacctccctggttcaagtgattctcctgcctcagcctcccgagtagctgggactacaggcacatgccaccacgcccggctaacttttgtatttttagtagagacagggtttcaccctgttggccaggctggtctcgaactcctgacctcaggtgatctgcccgcagcagcctcccaaagtactgggattacagcatgagccactgcacctggcctaaaagtttatttttcatcagtctacattctccaattttttaaagtcagaattttattgttttgttgctgttattagagacaagatctcactctgttacccaggctgggggcagtggcatgatcacagctcactgcagcctcaaactcctgggctcaagccatcttcccacctcagcctccccagtagctgggactacaggcgcatgccatcaccctggccaacttttttttgtaaagacagggtcttggtatgttgcccaggctggtcttgaactcgtgggctcaagcgatcctcccaccttggcctcccgcagtgctgggattacaggcataagcaatcatgcctggccttaagtgagaattcttctgtgtcatttccttctctttctctctctctctctctctctctctctctctctctctctctcgctctcgctctctcgtcgccaggctggagtacactggcgcaatgtctgttcacggcaacctctgcttcccgcattgaagcaattctcctgcctcagcctcccaagcagctgggactatacaggcttgtgccaccatgcccggctaatttttgtatttttagtagagagggggtttcaccacattggccaggatggtctcgatctcccaacctcgtgacccccccccgcctcagcctctcaaagtgggattacatgtgtgagccactgccccggccttcacgtgtcatttctttttgtaggaaccaattttaaaagaaagccgattttaagagctcagcttttaggttatatatctatataaactatatcatttccaactttcaaaattatatatatatatgtatatatatatacgtatatatacgtatatatacgtatatatacgtatatatacgtatatatacgtgtatatacgtatatatacgtgtatatatgtatatatatgtgtatatatgtatatatgcaatccatgcttatagaaaattgaaaaatacagaaatgcgagcaggagaaaagccacatagaactctccacaaaggtaacagcgaacgtcatttcagcgcgttttcctcctgtttccatttaaagagatctatagcagggacttggctgaaaccttgtatttgcatattcacaacggctgctgatcagaatcacaactggttaggggcttaaatacttaaaataaaataccccttttctgtgaatgatctgtttaagtgggtaaagtgctctggcaccctaagttaggagtttatatctgtgacactccttccctccagctaaacagcaaggggaggtggtcagggaagttccaggaatgcaggcctctggccctagagtggggtggggctgtggatgctgacagttgggggcccatcggagacagtcccaagcagcatggctgggtgtctgtggttccctcctatcaagaaggaacctctccacccttcctcaatgtgggcagaatcctgacacccaccccaccagctggatgaggtaatgccaacagtcaccaaaaagcaaaatgtgatttacagttctgtctgaattgttttcggagtgcagaaatgtaaaggaggtcttcatcatcctcgtgaaagacacgtacagggtgaaacgttcgaaagctatgtgaatgaggcatgatttcctttgtcagtatcagccaggtcatcgctgaccccggagttgggctgaccttccttggccgcccggatgccgacccccaatgcccctgtagcctggaactgctgggtcggcctgtgccttctccctctcacctccccccgggacttctgagttccttctccaaggagggctgtgccctagacttccgggccacttccctctacccttgtgcaggaaataacttacctacttcatgccctaattgaattccattgcattttcttcttaaaataaaagactaaaaactaacggttgcttcctgcctttgtccgtaatggccaccttccagtcttagagaagcagcgatgtctcccctccgggtttcccatgatgttacgttgccctctttgttaccacccctggtgcggtggacacagacattgcccaaacactaacggagagggaagaggtgcggggagctcagggcgttcggggtggtgttctggtggaggggacgctggtaaagagcaggtctggctcagtgcttatttcagggaaaactcttgtgatgaatgggccatccgggataaacagatgggacggagagtgcaatttacataacaattaagctagtttagtacatccggcaatgctgctgaaagcaggcctctccctgggcgggctttccgtgttattaatctactttatgacccagtttccccaaatggataatttcgccttggtagtgttaagatgtatttagcgactcaagtatctgcagcagcgagagggtgggtgtgggagtcggtgaattgtctcttacgccttcctttccgggttttcctggagaaggctgcctcactgggtctttgcagttggcgtgttccccggtgccattcgtatctgattcatgcgtgtgcgaccagtactccatttcactttttttttttttgagacggactctctctccgttgcccaggctggagtgcagtggcacgatcgtggctctctgcaacctccgcctcctgggttcaagcaattctcctacctcagccccccaagtagctgggatgatagggcccgccaccgtgtccggctaatttttgtatttttagtagagatggggtttcaccatgttggccaggctggtcacgaactcctgccccaagtgatccaccctcctcagcctcccaaagtgctgggattacacccatgagccactgcgctcagcctgttttcacctgttttctgaaatctgagtaaatgtggagggagagagtgccctggtgctggggtaccgcctagtaactggtggggagtgaactggaaggatgagaccagttccttttcccagcctggaacccgccccgccctccaggagtgcttggaatgtgctctttgaagggcccgagtcttccaccaaataaaggctttttcagatgctgattttggtgctgatgctgtgtggctttgtttgggttcagtttttatcctggctggcagagaggtctctaaaaatgagtccccgatgctttgtaaacatgacctagttgccgcagtgaccccagccgcccttaggaaaactggaagcccccgtggatcgggatccggcctccttcatccagggctgctggtcgggggaagctcacccgaaggtaaatcagagtggatcttgggaagagaccacttccttgggaaaggttgattaggttaaactctaacttgaccttcagttatccaaagtctctctccagggttagggtggaattttacatggcagaacaagaactaaagatgaccaagtttaagaaattgatatcataaaagtatagcaatttgccccgaatggtataaacttgtgtgtggcctggtaaggagagttctccctggtgtttttgtggctgcagcaggcgggaggctgttcccttcctggggctcccagcctggggtgaacttcattcctgccagcttctcagagcctggttggatattggtggccgtcaagtgctgcttttagaaaagaggctggtaaggccgggcttggtggctcacgcctgtaatcccagcactttgggaggctgaggcgggcggatcacctgaggtcaggagttcaagaccatcctggtcaacatagtgagaccccgtctctactaaaaatacagaaattagctgggcgtgatggcgtgtgcctgtagtcccagctactcgggagactgaggcaggagaattgcctgaatccgagaggtggaggttgcagtgagccaagatcgccccactgcactccagcctgggcaatgagcgagactctgtctcaaaaaaaaaaaaaaaagaaaagaaaagaaaaagaaaaacaaggaaaaaagaaaagaggctggtgggaaaatgtagttcctggaagcctcgcctagctgttgctgtgcacactgggggcccgaggccccaggatacccccgtgccttacccacgctatttgctgcctggcatccccaccctgtcatcccgagaatcccactgcatgttttggatctgtccgggatccctccttgttaggccaggtcagcgtgaggccgcctactgtgcctccttcccagtgtcacgttgctgcgtccacgagcctggcttccgcttccattctcagggtctggacagggccaggctcttcccaagcgcacagtccacataggctgcttatctggactcgatgtctccgagcagatcgaggctggcccacccctgctggcccgcgacccctgctggcagatcgaggctggcccgtgaccggggcaggcggaccttctccgggagccctgtgcacagttggcttcgcagcaggcctgtgtggtctgctagaaaaggggaggttgcagaagattttaactttgttaaaatcatgaactggttttgccgcagtaaagcgtaattcacatgatacaaaacgtcaaattgcgttttacgccattggtttggaccctggagcagtgaagttccacagtgtcatgataattcttggcgttgagtgacctcacgatgtgctgtccgtcttctcgctgttcagccagcagttcactgtctgtaaaataggtccaaaagccatccccacctccaaggagggagagaggatcgaatgagttcacttagaacaacgcgtgacacgtttgaacacggaagaacacggaagcctgtgtgttaggcgttaacattgttcccgcgtgaaggggtagaagaacaggcaaaatccatgatttttaaacgttaaattgtgtggcggtcagttagttcagcgccacttcttcttacggttttaattgtagtgtcaaaaaatttcacaaaattcagtttcttggtttcctcatctgaatgagaaggttggcacttaaatagaatctgtgactgactgttttgatgactttggacgagtagttcatctgctctaagcctcagtttcctcagtcgcaaacaacacaaatgcctgcttcctttctaagataacagaggtctcagaaagtacaggataggccagtgtactggctcacgcctgtaatcccagcaccttgggaggctaaggcaggaggattgcttgagcccaggagtttgcaggcggatcacctgaggtcaggagttcaaggccagcctggccaacatggtgaaaccccgtctctactaaaaatacaaaaattagctgggcgtggtgaggggtgcctgtaatcccagctcctccggaggccgaggcaggagaatcgcttgaagccaggaggtggaggttgcagtgagcctcaatcgcgccactgcactccagcttgggcaacagagtgagactccatctcaaaaataaataaagaaatacataataatgataataaatagctgtgtattttggagaaatgggtgcagccgggtgtatggccttctgctccttgtgggaccacaagggcatgttcttgctttggaagggagggtcacattcagggcgagggtgcggtggtggctctgcagccccagcggtgcaggttctgggctggtctgcacgggccacgatactgttcatagaagctgagctcagctggagccaccagttcccaccactgagaattacagccattccacgtcgtggatttttcccatttgttttcagcttgttgtgactcttgttccttctcctcgtctgtgtagttccttctgggtagagatgtgtctgtccgcattacctgtcgacaccgtcctagccactgggttctgggaagccccatcacggtgcctgagcttcacggagttgcagagcagcctggctttagagaacgcttagagaagatggagatggatggagacggctgtccatcagctgtgcagggccaagctgggcctggatcctacttagtctctctgacttcttctactcaagcatgatgtccgttcctgatgccttgccccgggcagcatgtgcccagctctgttcaggaagcgttgtgctggtgtgccctcctgggtcccgacacctgggggtgttttcacagggtgggaaggctgagtgtcctgggaagcgtccatgggatgtatcagtcagggaggctgggcgcagtaataaacacgcccagagtggaagggcttcctgtgagagggtgtggcagtccgggggtgggtcccagccagccgccagctctccctggagtgattcctggatgttgaggagggagagatctggagttaaggaagatgtgactttctcagtggccctcagacgtcttggcaagtgaagagtgtgaagaggtgtgccccatcccatggccactggagaactggcagaagctcctagagcagttggatggggagatcagagtgggtctcaagagtgccactcctcggcattgtgtggatgggcggtagtgagaataattactaagggcgtcataccctctcgtatctgcatcacccataaggggtgggcagtggtgctgccgtgtcttgtcaggaggccagctctgtgtcacccaccaggctgggctcagccacaagtcggcaacgtagtgcctccagggcagatgccacggaccgtagagaagcaacgcaaggtcagagagaaaagattgcggccggccggtgtcaaggcgggggacctgtgagctgggcctggagctgaggcagaacttgatggactatgactcaaggttgagatggggcagggactccgggggaggggcagagggcaggtgccgccgagcaggagggaggacgcggcaggtcacagagcccaccaagtccgaagctggaagttcagattctttgatattcagaggtggatcatctgtgcttttttttttttatcagtctctcactttttatccatcatctaattgtgacagcttatttgcctttataccataagatggggagtagggttgagatgaaatccaagcatcgtttcccttccccgatggtcgcctccctggggtgagacgttcgatgtgtcagacttcaccaagagcatctcccgcctcggtgcagtaatggacttggaaacgatttactccggcacttggttcctgtctccataaatgcggctgctttaaagggaatgtaaaaagggctgtaaattggtattgattgccggtggtcttgaagaaccccaactgaggattgaccgttccttggagtgaaggctccgcattcagacgcctttcgccttacgtcatcataattgagaagggaaaggagacgtgttagtttcagtctgattatttaccatcaaggcataaacacttctcagaggcagctgaacccatttgtcctgccccgcgcgcttatttgagaaggaacacggagagttgttagaatcaaaccaccgctctctgaattctgggtgtattattgcagtctcgaaaagactggtcatgtttgtctttaagtgtaccagcgatcaggcttctcattttacacctcaagggtttccgatcctcttacctcgctcatctgttgccctctcagataggagatacttggttctgtttatgctgcagagtgtgttcaaatccgtttatgattaaatactgctcaaacagccagggcagggtttattgacacacagcggcgtgatgaggatggagtggtaggggatgaatcattgctctctgttctgtttatttccagttgacaagaggtgacatttatttttaaatcgtgctcagagctctgtgacttctgcagaactccaaacgagatttcatttttaaaatacattaaagaggggcgataatgaccagtgccagcaaagggggcatgccttcttcctggcccccttaggccgataactccacatctggagctcatagataactttggttcaggtcatttaatccaagtacatttgtggcttgaaaaaagaattcttttcctgccctattaatttgctagttacttacattttgaaatagtcaacaaagttcatagctgtggtcacagcccattgtgtaattttaaagtcgttgaaaattattatttcttttctgtactgatcgtaacagtgctctgtgccaggccccaagctaggctctggggttggggcgggctgggattcccgctcactgagattcccgctcactgggattcccgctcactgggcttggtgtcgcggaaaaaacgaaggcagagaaagaattagaccacggtgcagccactgcagcttctgggccgggaaagccctgcgaggtcagctccctaaacaagagaatttgcataaccaccgtgtttttttttttgttttttttttgaggcggagtcttgctctgtcgccaggctggagtgcagtggcgcgatctcggctcaccacaacctccccctcctgggtgcaagtgattctcctgccttagcctcccgagttgctgggattacaagcacgtgccaccacgcccagctaatttttgtaatgttagtagagacagggtttcactgtgttggtcaggctggtctccgactcctgacctcgtgatctgcccgccttggccgctcaaagtgttgggattacaggcgtgagccaccgcacccagccccgtgttttcttttgagttttttctttttttctttttttcttttctttttttggagacagagttttgctcttgttgcccaggctggagtgcagtggcgtagtcttggctcactgcaacctccacctcccgagttcacgtgatttctcctgcctcagcctcccaagtagctgggattacaagcatgcgccaccacgtccggctaattttttgtatttagtagagacgaggtttcactgtgttggtcaggctggtcttgaactcctgacctcgggtgatccacccacctcagcttcccagagtgctgggattacagatgtcagccactgtgcccagcctcttgatttcttacccatctttaagatggtttttaaagttgtctatttttgagccctgaaaactggcccgtaactcccaaatcttgtcacctttacaagacagaacaaggagagaacagagatcatcttttcatgttgaccctattttcactgtgtgtgtctgtttgtttgttgagacagtctcgctgtgtcacccaggctggagtgcaatggcgcgatctcagctcactgcagcctccacttctggggttcaagtgattctcttgcctcagcctcccgagtagctgggattacaggcgtgtgcccccatgcccggctaatttttgtttagtagagaccgggtttcgccacattgcccaagctggtctccaactcctgagctcaagctatccgcccacctccgcctcccagagtgttgggattacgggcgtgagccaccagcctggcccctcttttcactttgaaaggaaaagtttaggtttaaagacattacttttgtgtgtcaaagtaggagtgcgtgcttgctttgctttgttttttcaaggctcatcttaaggattttggcttacgtattttctaagtaggcgttacattcccgcggttcaaaactcaaaaggtatgcggttaaaaattttgttttggttttttttcctctctctcatctcagtttccctccttagagaatcagttcccagcgtcttgcaaaggaagggcataaaacccagatgttttgtccacctgagtccgatttctccagagagctgcgatgagcatcatgcttttgtgtgcttttgggaagtctgcgtgcacgtggagttgtgtgtattcagggagtgtcttgttgtaacgtggttctgcatctttttcttggtacagaacagaagccacacaccagcgacaatcagaggttacataggcttggggcgtagcttttctgatcagatgagtttcacggctttagtacagaaaatattcaaagccagtgcagctggaattgtgatatagtgcacggtggaattgtgatacggtacatggtggaactgtgacgatacggggcacggtggaactgtggcgatacggggcacggtggaactgtgatgatatcgggcatggcgaaattgtgatatggtgcatggtgttttgtttcaaggagagatcgtaagtcatggcttcagtttgctggcaaagtgtgtctcagagtgaagccgataggatcaagcccaagtgttcagggcgctcagctgtgggtggcccgtgtacaggaatgggatcgcacggtggtccagatcgtctgtgcacccatccttgccctgcctccctccttctagggggttggctggaactcgggccccgctggccggcggtaggagctggaatgcccgagctctgagaagctcttcatctatcagcagtcagctttccacttaagcagagccaagtttagaatgaatgaataggatattttgaaatgctctggtgttgtgaaatacggaacttggcgagttcttgcggccatcccttttgttccctgctgtgactgactggcaggaacctgggcttgtcaagtcagtctgtagtgcacgccgttagattggttgtcattggccaagccagctccgggcaccctgaggttccctcacagcgaatccaccgaagagcgctcccatccacagccggctctttgaatacttaaagaaatgtaggaaaagcaaaactcacaagacaatccttccagccactggtcacaggatggccgttgctgaacttcaacattggccaccaatatctgctgtctgtgcttaaaggatcaaaaatgcagacctcagtcaggcgcagtggttcacgcctgtaatcccagcactttgggaggccaaggtgggcagatcacttgaggtaaggagttcaagaccagtttggccaatatgatgaaaccctgtctctacaaattagacaggcgtggtggtgggtgcctgaaatcccagctacctgggaggctgaggcaggagaattgcttgaatccagaaggcagaggctacagtgagttgagattgcgcctctgcactccagcctgtgcaacatgtgcaacagaacaagaccctatctacaaaaaaaaaaaaaagaaagaaagaaatacagacttcaaggtggaggttcacttgaagccaggagttcaagaccagcctgggtaacatagcaagaccctgtttctacaaaaaaaaattttgttgtggtcagctggatgtggtggcatgcacccatagccccaactacttgggaggctaaggcaggaggatcacttgagcctgggagttcagggctgccgtaagctatgatggcaccactgctctctagcctgcgtgacacagcaaggccctgtgtcccaaaaaaaaagagaaaagaaatacaaaccagcagaatgggccacctccaaaaagccagtacagtgggaggggccccagacatgtcactgtggcctgctgtggccacgggcagggccagagcctgagcctgggtccttctcaagacccagtgctgctcttggaagcgggtgagtacagaggccagtgagggcacagcaggttccgggtggaggtgctccttggaagctgtgtgagaggggctgtgggtgtctccattttactggtttggagctggcttacataggcgtcacaaaacagatgtctacaagttttcattttatgaactattttaagctgattgcttgatttttctttatcttaatagagattaaaattggttggtttgtgtctggcttgtatgtgcagcacatccccaggtgaagggcaagttgtacgtggtgggaggcgcatggctgggaggcgtgtggctgggaggtggtggctgggaggcgcgtggctggaaggtagtggtgggaggcgtgtggctgggaggcacgtggctgggaggtggctgggaggcgtgtggctggaatgtggtggcgggaggcacgtggttgagaggtgcgtggctgggaaggcatatggctggaaggtggtagcgggaggcgtgtggatggaaggtgatggtgggaggtgcatgactgggaggtgtgtggctgggaggcatgtggctggaaggtggtggcgagaggcatgtggctggaaggtggtggcgggaggcatatggctggaaggtggtagcaggaggcgtgtggatggaaggtggtggcgggaggtgcgtgactggggaggtgtgtggctgggaggcatgtggctggaagatggtggcgggaggcatatggctggaaggtggtagcgggaggtgtgtggatggaaggtggtggtgggaggtgcatgactgggaggtgtgtggctgggaggcatgtggctgggaggcatgtggctgggaggcgtatggctgggaggtgcctggctgggaggcacgtggctgggaggcagtggcaggacgtgcatggctgggaagcaagtgtctgggcctgcgtagctgtaaggcaagtgtctgtgaagcgcatgacgggaggtactccaccctagccccagaggcagggcccttccctgcacctgacctcactgcccgcctggtcctggtggcctccttgtctctctgagcattgcagcttcatctgcacgaggaggcgcttgaaccctgcctctaaatgctgtttcttctgaagctttgctgcaccgtgtatgtttagttacaaacacactagtccatgctccaggtgaagaccgaccaccgccgtgtgttgcccgcgtctttgggctctggtctcagattgggtgatggttttctattgtaaaagtgggagaatattaagcatttttgcctcgtcacgttttcttcctgataaatgtccacagaccctggtttatggttttttactccccctgtgtgccatttcagtgttgaaggaaaggaaagtgggggtcgctgcctctgggggccctgttgcccgtgttcccaccagctccatggacacactttccatttggaaacaatcacagattcacaaggagcagcagacgtgttgcagaggtccctgcacagcccaccagcctcctccgacgcgtccatcagcatcacagccgggaagttggcatcggtgcgctgtgtgtggttccgtcatctcatcccgtgtggctctgcgaccgccacctcggtcaccacgcagagccatccccaccgtggcggccacgcagccattgtaaccctggaaaccagtaaatgcgtctccatggctgcaggcctgtcgttatgagaaggtttcagaagcgggctcgtccgcagctcagggccgtctttctgagttgtgggcctcaggagtggattcctttttattgctgagatgccactgggtggaggttcccctgtttgtttgaccccctgtctactgaagtacattagtttttccatttttcggcctactacaaatacaatagctgctgtgagcaaccatgcttaggttttgagcggacctaggtttccctcgtcagggtgagtacccgggagtgcagtgcctaaggcctgtccttggcataggttttgtttttaaagcaactgccgacctcgctttcagagtggctgccatattttaccttccttccacccatgtatgagaagcccagtgtctctgcagcctcaccagcatttgctgtatttgttttaattttagccattctgataggtatgtagcttttgtttttttgtttgtttgtttgagacggagtttcactcttgtcacccaggctggagtgcagtggcacaatctcggctccccacagcctccgcctccggggttcaagcgattctcctgccccagcctcccgagtagttaggattagagggacccgccaccacgcccggctaattttgtatttttagtagagacggggttgcaccatgttggtcagtctgatctcgaactcccaacctcaggtgatccacccaccttggcctcccaaagtgctgggattacaggcatgagccaccacacccaaccttgttttttttgttttttttttgtttgttttgtttgtttgtttttgagacagggtctcactctgttgcccagctggagtgcgatggcacaatcatggctcactgccgccttgaactcctgggctcaagtgttcctcctgactcagcctcccgagtagctgggactacaagcgtgcaccactatgcctggctaattttaaaaaaagattcttttaatagagatgaggtcttgctgtgttgtccaggctggttgcaaactcagcctcaaatgatcctcccgcctctgcctcccaacgtgctgggattacaggtgtgagccacggtgcctagggagtaggtagctgtcttagctttgtgtttccctaatagctaactacactgcacatatttttttgacagaatctcactccatcacccaggctggagtgcagtggcgagaccttggctcactgcaacctttgcctcctgggttcaagcaattctcctgcctcagcttcctgagtagctgggactacaggcacacgccaccatgcccatctaatttttgtatttttagtagagatggggtttcaccatgttggccaggctggtctcgaactcctgacctcaggtgatccacccgctttggcctctcaaggtgctgggattacaggtttgagccaccgcgcccggcctgcattgaacatctcttcatgtgcttatttaccatctgcagagcctcttcagtgaaatacctcctcgtgtgttttgtcctcgttctaattgaattgtttggtttttatactgaattttgagtttttcctgtattctagataggagtctcttctcccagcttgtgacctctttatcctctcattggacgcctgcgcccatccagagctttacgttttgatgacgtccgatgtgttgagttttttctttttcttttatagatcctgtttttggtgtcatggctaagaactcttcaccaagccccaggtcctgaaggattttttgaaatttgaatagtttttccctcattggtttctccctggctgccttgtttctggttttcagaagcctggttgagtttcttcgggttcatcctgcatggggctcactcatcttcagtctgtaggtttatcattctgaccaaatctgtacatttttcagccattatttctttgagggttttttgcctcatctgctttctgttcttcttctgggattcagtgacatgcatgggagagcttttgttatgtatggtctagtgtgtccctgagactcttaagatttgattttcagcctctttttctctgttgttcaggttgggtaatctttactgtttcagcttcaagctcgctgatttctttcctatggctttttcattctgtgtgagcccattcattgaggtttcatttcagctgctgtactttttagatgtaaaatttcccctgtgcctcagtggggatgggcagcctgtggccaacttcgatgctggcagagccaggccggggagactccagcctcagccccatctctcccgagcaggcagatgcttcctgagaattaggcagacctgttggaaactggctttgtatgctgcgtgcctagctttttactttttttttttttgagacagagtctctgttgcccagggtggagtgcaatggcgcgatctcggtgcagtggcgcgatcttggctcactgcaacctctacctcctgggttcaagcgattctcctgcctcagcctcctgagcacctggaattagagacatgcaccaccacgcccacttaatttttgtatttttagtatagacggggatccataaaagaaaaaaaaaactcaacacacgtgttagtcaggctggtctcgaactcctgaccttatgtgatccgcccacctcggcctcccaaatttagctttttacctaggtcttttttgtctttcagttaagttttgtagttttctctgcacgggccctccgtgccccgtccctttcttgctttactctgtcactgttgccgtaagtgctttcccgagtcagcagcctccctctgtgcatcagggccctggaggaggttctccgttcagtctgcacgcttggctcaatgcagcagctcagactggagcttggatcctggacatcgtgggggctttgcctgtgtgtggcagtgcacaggggccttggaaaccccccggagctccccagccttgagctgccggcctagccctgtgtcgctgcagcccataatggtgcaaccttctgatgaccttggtgagaagcgaccattccctgcgacccccagcctgtttcctgcaggtgacagtggctcagtaaaatgccttgaattctaatctccaggcgtcggctgtcagttaacttcagaaagaactttttctgaaactttgagaataagaataattccagctctccaatgataagagctcacagatggcagcctaagaaggacttttctcttttctttttcttttttttctttttttttttttttttttgagtcagagtcttgttgtgtcacccaggctggagtgcagtggtgcgatcttggctcactgcaacctctccctcctggattcaagcagttcttctgcgtcagcctcccaagcagctgggattacaggcgtgagacaccacgcccagctaattcttgcatttttagtatagacagagtttcaccgtattgaccaggctggtcttgaactcctgacctcatgtgatcctcctgcctcggcctcccaaagtgctgagattacaggcgtgagccaccacgcccggcctgttttcattttaatatttgagttttgtttttccaaattagatttctcaaatgtaaatgcatccctttctcgtgcaggagtaacggggacgtgcacagccgtgttactttctcccaaaggaggcagccggggtgagactggtgaccccgctgcatcccataccctccacccatcccagcagcctcatgcctgtgggtgggacgtgctagaggaggggactttggtggggccttgggctcttggtcacatcctgccctgattcagaagatggcggggcaggaggtgtctgtgtctcagcagatgctggatttcacgtccacggccgcctggaaataaatgccagcaccgtgcaagctggctttgcattctctgcctttcccgagcgtccctgcctcagattccaaaatctgttgttctagaaactctctaaggttttacccagattcccattgttgcctcttatgtactttggtcgttcgtatttcctaggcttaaaacccattctcctgtgaagaggccttccctgagatcctggccagaggaggtcccgtggccaagtggcagcggtgccggacatacacggcagggcagtgggctgctcagcaccagtggcctcagcccagtgccagcgtgctgggacgggtacactcgtgcctgttaaccgcacacctgcgtgcagcacgggcacactcgtatacaacgggcacacatgcacgtcagccgcacactcatgcacgttcatgtgctgtctctagtgttttctgagaaacgggattttccttgggtgaaacgaggaagtcgtaggagacccacctcagatgctcgggtgcacatctggggagagtcaaccgcccagcatggcttttggctttgggggattccgttcctttgctgctgccttggccacaggcctccacagccctctgctgtgtctgtgcaccttctccatccctctctcgtttgggctccggttcccgcagaattggcatccaggtgaggtgcctgtgggcagagctgttgatggaagagggtgtggtcagaggcagggcagttattgtaggaagaacccccaggagcaggtggccgacgcaggcaccctcagatctgagatccagacaagaggcagcgctgggttcagatcaccacacaacctgtatcagcttgtgatcccgaacaaaaacccgtcttcccaagcctgttgacgatgatggtaacggcaccgtgctcactccaacgccgtggctgtgagcggagccagcttcaaagcactgggtccagggcgcctgctcgcggtcacccatagggtgggtggacacccatggcggcttgcacgttgcacgtcccccggctcagcaccgagcaagtgggcctggaccctgaaggatgtggctgctgcccgactccagagtgacaaatatagcaaaagagcttgttggtaaatactgcctgaaaacattggcttaatttgtcttctcaaagctgtttttgttttctgtggggttttttttttggacgttcccagctgactaaatttgccttcttccttcagggaccatcttggaataatcttgctcagctgaataatgttgcagactaaaaatagcaaatgcagccccgagccttcctgttgcctctagggcctgtccatcccgtcagcccacggtgcctctacaaacacaggtccctcctcgccgtggtacaatcgccacggcacaggaccgagcgtggagagttgcagcagtgcaggaagcttttcctttctctcaaaacagttactaccaatgtttgtttatttgagatagggtcttgctctgtctcccaggctggagtgcagtggtgcaatcgtagctcactgcagcctcaacctcctgggctcaagcaatcctcccgcctcagcctcccaaatagctgagactaccagtgtgcaccaccacacctggctgacttctttgtatttttggtaaagatgggggtctcactatgttgcccaggccggtctcgacctcctaggctcaagcgatcctcctacctcagcttcccaaagtgctgggattacaggcgtgcacctctgtgctcggcccattcgatttttaaaaccttaaatgaccctgcatcttctgctgcctactttttcgagggcttttggtactttggattattaagttgtgtgagtgaacatggtaatgaccttgccatagcagctcttggtgctctgaatggctgcgcaccaggcagtgcccaagacctccgtgctcccagctgggattctgtgcacatccagagtttgtgttttgggggttgttgttgttgttgttttctttttgagatggagtcttcctctgtcacccaggctggagtgcagtggtgcaatctcggctcactgcaacctccgcctcccgggttccggagattctcctgcctcaacctctcgggtagctaggattacaggcacccaccaccacgcccggctaatttatgtatttttttgtagagacggatttcaccatgttggccagggtggtctcgaactcctgttctcaagtgatctgcgtgccttggcctcccaaagtgctgggattacaggcgtgagccactgtgcctggcccagagttcgctttttctttggttggggagctctgacttaatttctctctgaagccaagcatttctattttgtccaaatgtgtcaatcaggggtctgtgcctcgttgtgtgtgtgtgcgctgcgtggctccacggcccccatcctagactgtggtccaggccagggctctgggctcagcagacagccaggctgcttccactggtctgtgaagcttctgtctcaatgctcaaggtggcctcagtgttcagcatggttgccagtgccccggtcattatgtttccattccagaggggagagaggagggagggatggtgggcggtgatcctctgggtagctctctgcccacctcttctgagactcccacgagggctgtgccgtaggccacacccactttgcattgctggcccccagctgcaaggggagcaggaaagtcaccttttagctgagtgcgtggccacacagaaaaatagtggggacagggagaggagaagtgggtttggggggagccccgccctcctaaccctgcctgctgccctctgtccccagcaggagctcccccgaggccatccaagcgcggtgcacccgccacccacagcgtcctccgcgcccacgttgccctaaaccccactgtgctgtgctcgctcgcagttcctgcaggcgcgcgttctctctctgaatttgtttcatttcactgcgagttggggtcgcgggggtagatcggagctgcctcttgaaaatagcagtgcccaggctttggcccaggtggccggaacgccccttggagcaccgacgccatcggctccgggaaatgcagcgagcacagagcccagtcccttggtctgaccgggggcgctgcttttgttcagaaagcggtgggggtgatgtcatcgggttttttttcactgctgttgcccaaagtgaaaccgggcttagttgttgtctcaggagcccagccagccagggggacacggcctcctgcccacaggcagaggcccggggccagatgtccgctttctctttcgctccgcaggagtgagaagcaaggacctcactgcctttgtgcggccgggcccctccggccagtctgcgtgaacggactctccgggcctcgcccatgctccgggcgtgtggctgtgttgggaggacgggagctctactgcttggcagtggacacaccaaggctgccgactggcccagtgggtggcgatgccacttacatgtgatttctcaatctccgtcaactgccgtggctgcccgggctgggctgccctgtaggtttcagttcttcagggcaacaggctgggatccaggcaaggtgcctgcactcagaggggtagggagccaggggcacatgtgctgggcgtgggctggggcttctggctggcaggggtgtgggtttgggcctggtgggattccccatattaggaaggtgagctgagctcggctgcagtggctgaagcaaggaagtgatttgtcaagccatttagacactgtccctgttttctttcaacaaacagaacttttttttttttttaagcagcgaagaccttttgctctctgttggggtgtgattggggtttgcatttgggggctctcttgagctttgccgctgtcttcaaggatggtatctaaagggaaagtcttaaaataaataactttgaatttggataggaatgtctatgcagtgagggacaggaggcttccgtgtgtttcactagaacgttcttgtttttggcctacgaatgcttttacttaggaagcacgagacctgtgctgcagaccgtctgttggagctggccgcggcaggacggcgatcaccttcctggcaggcccctcctggattctgccctctgcttctgaaagcgtttcctccatcagctttagcaaaactgggcctggcagatcatttgaagtcaggagttcgagaccagcctgaccaacatgatgaaaccctgtctctactaaaaatacaaaaaagttagccgggcacagtggcacgtgcctgtagtctcagctactcaggaggctgaggcaggagaatcgcttgaacccgagaggtggaggttgcagtgagccaagattgtgacattgcactccagcctggacgacagagcgagactccgtctcaaaaaaaaaaaaaccgtgcctgggccttggaggtgcctgagtccagaagacagacagcgggagctcactcctgccatgtcgctcttgtttcttctcccctctgcagggcggcagctgctttgccctcaagtcttctcttttcgcccactctattcatagggggaaatgacaacacaggcgctttccctcaaactctgtgtattcatacatcaccagagtgttcagagaagtgggatattttggtgagttaatttacttaatgtgcttagcacacagtacctggtatatataataatagcagatattagttgtcaactactaattttaattttttttttttacaaacggggtcttgctctgtcacccaggttggagtgcagtggcacaatcataacccattgcagccttgaattcctgggctcaggtgatcctcctgcctcagtctcctggagtagctgggactacaggcatgcaccactatgccaggctaatttttttatttttattttttgtagagacggggtctcactctgttgcccaggctggttttgcactcctggcctcaagtgatcctcccactttggcctctcaaagtgttgggattacaggcgtgagccactgctcccagcctattattattatagaatttcatgttaaggtttgcaggttattcttttactttatttttaaattttatttgtttatttttttggcaagggcgtcttactctgttacccagcctggagtgtgatggtgtgatctcagctcattgcaaccttcgcctcccggggtcaagtgattcttgtgcctcagcctctggagtagctgggattacaggcatgcagcaccacgcccagcttgtttttatatatttagtagagacccgtttcaccatgttggccaggctggtcttgaactcctgacctcaggtgatcctcctgccttggcctcccaaagtactgggattacaggcttagccacggcgcccggcctgattttgcaggttgttctaaagtgcggtgtttctccttttaggcttcagtgctgagggcggcctgctgtccgtccctgcggcagactgggccctgtcccaccttcccgtcactcctcgatgtcacatcagagtgctctctcctgggtgggaacccgcgcacggaggaaacactttaccagagtaaacgagattataacttgtttgccagagaacctctcctgtggccatgcctgaacctctcctgggactgtccgtggtcttcacattggtgcttggacacccgtccttcgggaggggaggaaaagcggccggtaaaatggagacagtcggtggcgtgtgtttgccgattggactggcattggtatagacagataccaatcactgcacagacatttccaggggcccttccccagccatgtttagtggcactgacctcaggcagctgggcccccgggacagcaaccaggggactgccctggccctggatggcagccgggaccggctcacaagcttctgtttggagcagttctgttggcagccccccgcctccagtggagatgtgacacgactctttcttgcctgccaaacgttctctgattctttggatcatcgatcctaacacagcaaaggcggtattgttgctgtcctttcaaggttaatccaggatcagaaaagtctaatcatttctctgtggtttttggaatttccaaagagcacccagattttaaccctcagtcctcggggttgtccggctgcggctgtgctgctgttgagcattaagctcattccacttcacatgtaaacttgtttctatgcattcacctcctgggagactccacattcctgagagaactgcatggttatgaactcttactcgtgtgcactaaagtgcacgtgctgtgtgtgtactgaccctctgccctgtgggagccacgtgctgtggggagaacagaccagcagcagatgggactcctcctccaggaacctgctaccagctaggcgtggtggtgcaagcctatacttctggcactttgggaggctgtggcaggaggatcacttgaggccaggaatttgaggccagcctgggcaacatagtgagaccacgtctctttttgaaaaaaaaaaaaaaaaaaaaaagaaagaaaagaaaacgtatttttcttaagtcgggcatgagagtgagccagggaattcaaggaaggctgcctagatagagaaggggaccctggggaacagtcttagaggacgcaaagtctatgcagataaaccagcgtctggtacttggtatcagtcaggtggccagtgaataatgactacgtggaattactgtggacagcattttgagatctgcagattaagccattttgacttcccagaagcattttcttaaatcagcgtagagacagaagatgaaagttaacctgaattgctcgtcgcaagcaagctctgcccgggtcagccccagagggttgcagaacactgtgtctgtgtccgctgtcttaaagagcctagtccatctttacgcggtctttttacgtctgtttaagccacacagcatggtggggagcggaggtgatttcggagcctactctccgatcctcaggatcctcttcgggagcagcaggcagtggctttctcctgggccaggcagggttgtctggggagtggaacgtctgctagaaatgcagatcgctggggccaccgccgtttggccgtgtcagtcatctgggggtcccttagcctccgcagagtaaagctgtgggagtcaccacgggtccccatggcgggattgggaagcagtcacctaccagatgagcgttccttccgcgaagggaaggtggggggattttgaaggagctgtgaacaccgagggtgccgtcctcgcctgtgctgccatggggtgctcaggactgccgggccctgggagccccacccggcaggacacacacctgagccccagggagggtcggtggccatggctgtgcttggccgcctctgtggggctctatcctaattcagtgaggtctctcgccaccttcctccagggtcttcctgagacagagaccgagacttcagcttcaaaaagaaaccctggccgggtgcagcagctcacgcctgtaatcccagcactttgggaggccaaggcaggtggatcacctgagctcaggagtttgagaccagcctggccaacatggtgaaaccccatctctactaacaatacaaaaactagccaggcctggtagtgggtaccagtaatcctagctactcgggaggctgaggcaggagaatcgcttgaacccggaaggtggagtttgcagtgagctgagatccagccactgccctccagcctgggcgacagagcgagactctgtcgaaacaatttaaataaaaaaaagaaaaggaaaaagaaagcccggcttcggtcagaccgttgtctgcgtttttcaccgcgtgtcaccgactcagcatatgggcttgagtatctcgctgtcttttctttttccaaataggacatgcttatttgcctgattacaaaaatagatgcattctccctatttaaacaaattaggccctatgaacgcataagaacttataaacactaaaactgctaccgggttttaattcacacacaccacgcacacccccacattgttgtcactgcgagaacggagggcccagagccgagtacactcggccagggtgagtgatgggcaggcacagagctgtgtctctgaccaccctgctacccagcttgccaccgctgtcagccgtggggttcaggagaacagggttgtggcatggacccaaaagtggagtcacggttgcagctctggttcctggaggagggacgcaggcccagtggagagggcgtggtttgcaggcaccagtgctggttccgtgtctgtcggggaggggatggacgtttgtgttgctgtcagggaccttgccgacccagcccccgccccgccttcaagtttgtgccttattttccaaagccgccacacttgagacgtccttgctgcgggttcgtctgtaacctgtgtcccttcactgccatgcactgctcttagctgctggcgaagacgtggtctctgcaatagagaggcgcctatggctgcagccacctgtgttcgttttggggttgtcataaataaatgccttccatttttaatagaaagacagtattttaggttaaaaaatttaaggttgtcagaattctctgatttggggattttatatgttaacgtttctttcaaaaccatttcctgaggatgggcgcggtggctcactcctgcaatcccagcactttgggaggccgaggcaggaggatcccttgaggccaggagttggagactagcctgggcaacataacaagaccctgtctctacaaaaaatcaaaaccatttgctgaacagtcttatttctcggaggagtttaagcaaacactgcagggcctccggcattccagtttcaggccttatctgatgtggcccaccctgggaccgtcacctgacttcctgtccctgcacagagaacttgctggtaggaggtggtgaggggcctccgaggtggtgggtgagcatccctgcaagtcaagctctgctgttccccggccttcccttgagactcttgggggcctgggccctgcgggacgttttccccctgcctcagagccaaaccacttaacagaaccaggcgagccaggtttagtactttatcgggtatcctaaagacacgttgcagcctgcaaaattcgaaaagtacctggagtatgtaacagcttttgcctcccattcttgagtctttcatttcttcaaggacatggtagcaacatttaaagaaccttttgaaaagagagaggcggccgggcacagtggctcacgcctgtaatcccagcactttgggaggccaaagcgggtgcatcacctgaggtcaggagttcaagaccagcctggccaacatggtgaaaccccatctctactaaaaatacaaaaattagccgggcatggtggtgggcacctgtaatcccagctactcgggaggctgaggcaggagaatcgcttggacctggaggcggaggttgcagtgagctgagattgcaccactgcactccagcctgggcaacaaagcgaaactctgcctcaaaaaaaaaaaaaaaaaaagaaaacagagaggcctgcttataacaccatccttatcctgggctgttttcctttgtccttccagtccttgtctaataacaagaataactgaagcacattttcagtaaccgcttgctacgtgccagccgtccggtcaggactgatgttcacggcatggagacctgaggccacacggaggccgggctggccagggcggggctcagattcagtgacttgcccaggtgcccccagggcatctgagcagcccaggctccagccaggcaggtctgacttcacctcccttgccgtgagccgctgcactgttccacttgggcttctgctacatttatcaagctgttgtaaacgtttccatattcccccacgcctcagtatttagcgagggctccttatgtgtgacacgccctgtgtgcgtctgatgacgttgcttggaatcatttgttcagtccacaagaactctgattatgcaccatcattaccccagtttggctgatgagggaaaccaggccagtgtatgaagagactgaccaaagatcccagtgccgacagttctccattcattcattcattcattcagtcaccatcatagcccactgcggcctccgctgcccaggctcaagccatcttccctcctcagcctcccaagtagttgggactacaggtgtgcgccaccacacctggctaatttcttaaacaatttttagagacaggatctcactgtgttgcccaggctgatctcgaactcctagggtcaagcgatcgtcccacctcagccttccaaagcgctgggattacaggcgtgaaccaccgtgggattacgggcatgagccaccgcgccagccaatatgcatagttttaaatggccatagtaacgcaaggcttcaaacagaagtcctcaggtctcacttcgcagaggcagtggcttttaaagcatcctgattaacagtctgagctgctattcactgagttttcgccctgttgtagacacacatggctttccgttagagaagacagggtctggctctactgctgccctcctcatccggagccgcgggtctgcgctgcacgccccttacacgtgtgcctctttcccatagcgcagagtttatcttcttactcgtccagcgttctctgtacctattgtgaattgatctctggacgctgacccaactctagaacttcgctcagcagttgggtaagacgacattcctgtccttcagttctcctgggaactttctcctgagagccctggctctctcctgcacagctctgggctcctgcacagcttctgttctggggcttttcaccctcttcctggattctttcagttaggacgtagttttgattttgcaacaaaggtcaaaaataacgagggccaagtttgtttcttttatacgtgacggtctttttttttttaattttattatttttttatttcaagctgggttcttgctgtgttgcccaggctggtttcaaactcctgggctcaagcaatcctccaacctcatcctcccagagtgctgggattatagatgtaagccaccctacccagccacacatgaccatcttaatgtcagctatgacctggaggcaccagactttttctattacgttgcttgttgctccgttatgcagtgtgcctttatggtccactgtggctgctcggctcctgccatcacagcagtatctggctgttgggaaggggaggagtgaagaaggcccttggttcctcatatagacatgacccatttgtatcccattgaccagctcatagtctcatggttgcaagaggggcagagaaacatggtcttcagttgggtggacgtttctctgtctccatgtttgctatagaagcaggagagaaggtgctctgggaactacagcctcagccacagtccaggaagctgcccagtgcccacatgggaactgcatcctgcaggtatcgctcgtgaaaaccggcctggcgtcttctggcccttgctcttgggtctgctgtttctctcacgggagaggctgctctgaggtccccgaagctgcaggctgggtgggacggtgggagcctttccctggtctttagtccggctgacatcctctctctggccgtcatagccagcgccatgggattggggaagccacagggacctcccagcacgcgccaaccctggacttcccccagagctcatctgggtggcaggtgctggccacgtggagtctgccctccacgtgccgtgggtgaagcttcacctggcgcagggaaggccatcagacttccagctcgtcacccatgtcctcaacccctaaccactgaagcgatgcctgtgttttaaccttagtaaccgtgccgcccagctcctagaagacacgcgactccacagcagttaggagacagcagatgcattcccagagctcctgagaaggagcggcttgtgtggggtgactctatctcaagccgtaggcctcccagacagagcctctgaagctcctgttttctttgtccttcctgagacagatctcatccagcctcttccttttgatgttttctgagtcactttaaactgtgcaagatttcccgtttcccctggctgtggctcttgtggtcctggccttggtgggcaggtgcagggcccgctccctccttgggaggatgagatgctctgtggcttccaccactccccagatcgtctgcttcctccttgcccctcaaactcctttgcctcagtccctgtcttccttgatgggggcattccccaagtgtctgttcttgtggaaggggaggtgccccccggcccacccccccgctgcccaagtgtgcgtgggcatcggtgcacggggctccctccctggggcttcatggggggctcaggaaggctgggtctcaggcttttctcctgcgccattgtctgctgatagctgggctcagctctggaagcttggggggctgagagcctctggtcctcctgcagaatttcaggtcgcaaggctatttttggcgtgagatgtcactgtctgccgcttctgtgttgggtgccctcgtccaggcctcgggttcaccccatccagaaagtaaacccgtccttccgctgggagagacggggcgaggggacagcggtggacaggagcgatctgtcacattcattttaaaaatcgcctccggaagctttcacgggctcttccttccctctctgattatttctctgagtctgaaatgatgacaattgtatttatatttatgtcatcgagaattaagtgagctatttttattttcctgacagctttctgtttggccgggcaggtggtaggatttgtggcctagggaggggatgggaatgaaggcacatgacatgccccaagtcactcgggctcagcactggtggagcggtggccagttccagctcgctgtgtagagacggctctgtggtctgaggctgagccaggcagtgtcatctccaaccaagtcaccagtttggcccaacttccaggagccatcagcttctgggtggacctgggaaaaacccagggctggagtagaccctcagtgtgggagcttttgggcaagaattctccccaaaaacagcttgcctgagatcgactgcacataccttacaactaaccctttccattgttccagtccgtggttttcagcgcattcgcagagttgcgcggccaccaagtcaacttcggaacattttcctgactctagaaagaaccccctagctcttagtcattctccgtcccccctgcctgtcccacccgtcactccagccctaggcaaccactaagctcctttctaagtcgggcaagaatgttctggagagatgtcctccacagatgggcacttgctcgtacaggaacctttccgccgggctggtggacggagatttctactctgtggacacacttaaccttagcggaatctccgccggtcaagaccggcagtgtgtgtggctgggtttaaaccaccgtgcagcaccttcacgatgcaaaacgtgctcgttcagactccagctagagccctgcacctccatcaagatattacagggagagatgtaactggcaaactccctgagcatgctggggaaacatctatttaaaaatcaagccgggtgcagcggctcacacctgtaatcccagcactttgagaggctgatgcgggtggatcacttgaggtcaggagttcaagaccagcctggccaacatgaccccgtctctactaaaaatacaaaacttagctgggctctgtggcgcgtgcctgtaatcccagctactcaggaggctgaggcaggagaatcccttgaacctgggaggcggaggttgcagtgagccgagatcgcaccactgcactccagcctgagtgacagagcgagactctgtttcaaaaaataaataaaatcaagtagcatgcttcatagcattttctcctcctcctagtaatgaggccacctgcctcaggacaatcactgttacggcagatactgtgaaaatatttattgttaaactttaattggaaagctactattacagtaggaaattgtcatctatagatggcattagatccctagatccctgcctgtcctataaaacatcgttttgttttagtgaaaactcaatacatatgtacatatcatctagaatcagttttgttttttttttttttttaagacagagttttgctctgttgcccaggctggagtgcagtggtgcgttctcagctcactgacatggccgcctcctgggttcaagcaattctcctgcctcagcctcccgagtagctgggattacatgtgtgtgccaccatgcctggttcattttttgtatttttagtagagaggggggttttgccttttggccaggctggtctcgaactcctgacctcaggtgatccgcccacgttggccactcagagtgctcggattacaagcctgagcctccgtgcccagcccataatcaggttttgaactggaaagcacctttgagatggtgtcttctattccaaccattctgttttattagcaaagatcacagaagcgcagagaggttagggtgagtggttctaaaccaattttctcttttggtggcgttcacctttgtctcaaatccgcacaccttacggctctcattcctgccacaatttgctctttgaaggggagaagtcaagcctgggaaggcctttccaccccactggagttggggagtgatttagcccaaggtcagatgggctctggctagtacctggctttcaggtgccagtccagagggggaccatgctcctcttctgtgcgtgtgtgtgcatgtgcgtgtgcaaatgtcttacgaaaaaacacctcttcatgtcttaatatccaaaccccgatctccaggatccccttcttcttgtgacctcagtcatgggccagaagccacatcttctttctacttggccttgatggctgcagcgtgatccgatcccatattaacatagggactttcacgacacagaaagtcagaggtctcaactgtgcccttctgacaaataggagaacatggtctgtttcgttgatttgcagtggttgagggaactggagaaaagagacaaatggcaagggccatagaagctatctttaaacatttgtcatcatgactgccatcgtgtccagcactggtggaacgggtaggtgtgtgtgcatgcgtgtgtgtgcgtgcacgtgtgcatgtgtgtgtgtgcgtgggtgtgggcgtgtgcgtgggtgtgtgggcgtgtccgtgcatgcatgtgtgcgttcatgcacgtgtgtgcgtgcctgtgtgtgtgtgtgtgtgtgtgtgtgcatgcatgtgttgatacagacatggacactgtgttcattcagcaccgtcgttcacagctggagttcaccttaggtcccctgcctggaccctcagccagatgctggccccaaacctctttccttgcttccctaggtcagggacaccagtcccatcctcagacaccagcttgggtggatgtcggctctgggacccacaaaagctaacagcccccaggactgaagagcccttgggtatcatagagcatcttagaaaatgggtgatgcaaggccgggtgtggtggctcacgcctgtaatcccagcattttaggaggccagggcaggaggatcacctgaggtcgggagttccagaccagcctgaccaacatggaaaaaccctgtctctactaaaaatacaaaattagctgggcgtggtggcgcatgcctgtagtcccagctactcgggaggctgaggcaggagaatcacttgaatccaggaggctgaggttgcggtgagccaagattgcgccattgcactccaccctgggcaataagagccaaactctgcctcaaaaagagaaaaaaaaaaaaaaagggtgatgtggccagtcacggtggctcatgcctataatcccagcactttgggaagccgaggtggttgggtcacctgaggtcaggagtttgagaccagcctggccaacatggtgaaaccccatctctactaaaaatacaaaaattagccaggcgtggtggtgcgtgcctgtaatcccagctacttgggaggctgaggcagcagaatcgcttgaacccaggaggtggaggttgcagtgagccaagattgcgccattgtattccagcccggatgacagagcaagactccgtctcaaaaaaaaaaaaaagaaaaaagaaaatgggtgatggagctttctagtcaaaatactgatgcaggaaatctccactgggctggactgaagaaagtgtaaaggacatcagacgttcctctcaatgtgacttaagaggacagaattgtggagtattttcaaatagccttgggatgcccttctaaacctcaggggtgaccgaccacccacccttatcccccaagattcactcgctgggccgtgcctcccagacagcttctcatcttggaaacagtctcagagtcccttttgtgtttggaagtagaaacctggtgcccacaggcctgacagcgcctggcactgaacgatgcggcccagcctcctctgaccagtatctcggggagaatcaggactggcccagttgagccagcttaagtgcctgattttctctcttccatgtgggcagcctggctagcagacctatgggaggagccgcacatttgtaatgctgagtcacttcctttgaagcgggtccctgggaagaagacgcaagaggaccccctgccgacagccaggcacccttcgtcaccctctgacctgctcctcagtcccgtctttcaaaaacgctttgacgaagagcaaagggactttcatatgaaagaggggtgtctgcgcacgtccatgcaggattttacgtagattgactatttaaacattgctgcagatttaaaaacacagtcaggcatagacccagcagcctggtgcttcatgcaggttccactacaagagaccttagcgtctctcaagtgttgagtactttgcccgtcctgaatgccttcgggaactctgaaaagcgcattatcaccggtggcttatgtacattctttcttaaccccctcctacaattttaaacaagagccttttccaaacagctgcgcaggcggccagcgttccttatctctgtgtgggcaggctgctgctttacattgtttttgtttttgtttttgttttgttttgtttttaactgagtcccacagttagcaacttgatagttgctgcctcatcagtttagaaattgaaaggtgacctggataagtaatgctcagctttgtaaaaggtggcagtttcttcaagccagatgaaccctggatactgttcacagcacactggtgttgaccctgacgcttgcggctggctttgtttgcacttggtcgtctccagtagaaaaaccgaggctcacggttttaagcccagaactgatcgtgaagccggtccattaagctctgggtggataatgcacgctctctgcgactcccgcctgccggagcaggggtggaattgctccttccgttgtcagatcttctaggcagtggcagggaatcatcttgaaaatgtctgcataggtggttgccgtgctatttcagtcttccagtgtgtcatttgagaggtggcagatcccacctgggtgccacagcagttgccctggcagacaggaagtagccgtgtctgtctggagcctgcgtgggagatggcatcagcggcacttgtctggggatatttatatctcttctgttctcacacacagtagaaagacaactgacggctgggcacaatggctctcgcctgtaatcccagcagtttgggaggctgaggcaggtggatcacctgaggtcaggagttcgagaccagcctggccaacgtggtgaaaccccgtctctactaaaaatgcaaaaaattggccaggcgcggtggctcacgcctgtaatcccagcactttgggaggtcaaggcaggcggattacgaggtcaggagatcgagaccatcctggctaacacagtgaaaccccgtctctactaaaaatataaaaaattagccgggcgtggtggcgggcgcctgtagtcccagctactcgggaggctgaggcaggagaatggtgtgaacccaggaggcggagcttgcagtgagctgagatcgtgtccctgcactccagcctgggcgacagagtgagactccctctcaaaaaaaaaaaataaataaaaaatgcaaaaaattagccgggcgtggtggtgggcgctcgtaatcccagctactcaggaggctgagacaggagaattgcttgaacccaggaggctgaggttgcggtgagctgagatcctgccattgcactccagcctgggtgacagcgagactccctctcaaaaaataaaataaaataaaataaagaaatagaaagacaagtgacttccaaataagccaaagtctcagttcctaagtgtcctgataaaagcatcgaaactgctctctggggcccaggtttgagagttacggtccagttacttagacacacagacacgcaccttccctgggtgttggcgtcttcttgagtctcctcctgcacctcacacccgctcctcctcctgttgcaggtgtaccttccggtttcccagcacggccatcaagatccagttcacttcgctctatcacaaagaagaggccccagcctccccgctgcggccactgtacccccagatctcccctctgaagatccacatcccggagccggacctccggagcatggtcagccccgtcccctccccgacgggcaccatcaggtgagtagccccccagcctgcccttgggcccccaggagagagggggatgatgcgagcgtgcctgtcgtacgcagcaccgggttccaaatctctctggaaagttgcacgtgcatggaaatacagaaagtgttgtacgtccatccgggacctggctgaaatttccgtgaattctcttacaaagggaaaaatcactgcctgatcatcacttttcccactggaaattttacatattagagcttgttaaagcaagcacaggtttttttgttgttttttgtttttttttaaaggacgttgaaaatgttttttgtttgtttgtttgttttgagatggagtttcgctctgtcacccaggctagagagcagtggcgcgatctcggctcactgcaacctccacctcccgggttcaagggattctcttgcctcagcctcccgagtagctgggatgacaggcgcctgctaccacgcctggctaaattttttgtatttttagtagagacggggtttcacgatgttggccatgctggtctcgaactcccaacctcaaatgatccacccgccttggcctcccaaagtgctgggattacaggcgtgagccaccgcgcacggctgaaaatgttttaaagtaatatttgtccaccaggatttggtgaactttgtttctttaagcttcatttgtgaaaattctctatgaccttttagaaattaatctagattttgaagaaagtcctcaaacttcctcatctctggcatgttatacaatgatgagcccctgagtaggggttgcaggtgaaaagtataaacagagctctgtgtagggagtgccggtgagccctagactgagtcacacacgaacctcaggcgacagcctggatgcatggcacacagccctggccctggtcctgtcatacagggatgcaaaaacagacgtgtacttgaggctggagggttcatacattctttaatgatttacctcttcattgcggacatttctaaacgtggctggcttttctctcccaaccgcacgtctgtggctctgcagatgcgtggctgcgcgtggtttggtgccggagctgtggctcctccgcagcaccagcagtttctgcgtcgctcgcgcgtcaccagcaaaggtcaccccagtggaaaaagcagatcacatcttagggctgttgtgaacatggtgttgacctcacatataccctgaaaggggctcagggccctcggggacatctgtgaagcacgctctgggcatgctgatctgttggagcgagcgctgtggcaatcccaggctggtcacgtcagtccctccctgctgatctgcgcactctgctgaaccccggccgcaccttggcttgcttttttctttttttcctcttgcagctgtaggagaagaaagggcttttgtttgtatttcagagacagcgtctcactctgtcgtccaggctagagtgcagtggcgcaatcatagctcgctgcagcctccaactcctgggctcaagcggtctccccacctcagcctcccaagttgctgggaccacaggcatgcaccaccacacccacttaattttcttatcttttgtagagacagggtcttgctatgttgcccaggctggtctgaaacccctgggctcaagagatcctccctcctccacctcccaaagtgctgaggttacaggtgtgagccaacacacccagcccgtacatggcctgcaccttttcagggtccacagttagaactacacactggcttctcttggaacacagccatcaggggcacagctcctctaccctgctttgccgacaagttaccagtgacctacaagttacaaggtgggaatcatctccatttgagttgcttggagtaggtctccttttttccagagccagtgggtgggagtgtctctcgtggagagagaagttcagggacagtgctgctgcggaaaggagaggccccgggctcaggccgggcatggtcacctgtgtgactctgtgcggtcacttcagccccccaccttcccgggcccggttcccgtctgagtcagtgctgtgacgtcatgaccctctgggatgatgatgatggtgaatcctaagtgactgagagcctggtgtgtgcccgcctggccctgtgctgagcagtgcacatgcagtattttatgtagtccatacagctttgagaatgttccagaagtagatagtggtgatggttattcaattttgtgaatatcctaaaagtcactttaaagagtgaactggccgggcgcggtggctcacactggtaatgccagcactgtgggaggccaaggcgggtggatcacttgaagccagttcgagatcagcctgggcaacatggtgaaaccccgtctctactaaaaatacaaaaatcagccaggcatggtgccatatgtctgtaatcccagctactcgggaggctgaggcaggagactggcttgaacccaggaggtgaaggttgcagtgagctgagatcacgcgactgcactccagcccgggcgatagagcgagactccatttctcagtaaataaataaatggtgaattgtatgttatgggaattgcatctgaagaaagcagttgagcgcagtatatgtacttaagtcttcacctagtaccaccttaaaggcgctgtagaaatggtggccaagaccagctcacgtgctagtggaagctcacaccagaagaggctggtcctgctgcttttggggcgggtagcaaaggcctcaggtccagagagaagcaggccaggcagcgatccggggctcctgaggaagggctaggccagcgcccccgccttagcctgggagtgggttattaatcagcaggttgtaatccagctaaacagaagcctttttttttttttttgagacggagtcttgctctgtcgcccaggctggagtgcagtggcgtgatcttggctcagtgcaagctccacctccctggttcaagcaattcccctgtctcagccttgagagtaggtgggaatacaggcacatgccaccacgcccggctaatttttgtgtgtttttagtagagatggggtttcaccgtattgaaagaaagaaaaatgttttggtttgctccgggagggggcttaaaaaaataaaactatttcccagtgttaatccaaatttgcatagtaaagtcgcttttattacaagagaggttgtggtttgcgaaggagttaagtgatacctgtgttttaaattacggcagggaaaatactgtttatttttattttatcttagcttcagggggtacacgtgcatatttgtgacatgggtatattactggtggggattgcgcttctggggttcccgttacctaaagggtgaaccgcgtaccccgtaggtcatctttcacccctcgccctctcccgcctccctgcttaggagtcccagtttctcattgtttcgatcttcctgttcccgggtacccactgttcagccactgcttgtaagcaagagcaggcgctgtgcggtattgtttctgagttggttcacttgggataagcgcctccagctccatcgcgttgctgcccaggtcaagatttcattcttttttatagctgggagtaaagaaattgtgtactgagcacctgaagctcttgcagctggagctgttctgagaagctgggtggcggcctcctgtgactgcgagtccccgtcagggggtgcgagcagctccctgggcctgcacctgccctgctcttgctgcgggagccaggaaggtggggggccacccctttcccctccttccgcccagtcctgttctttgaaaccgccctgtgcaaagaccggattcttgttggggagaattctgtgcggagaaagtagtaagttagggactggctgtctggctttttggccttccattgttacaataaaagcctctctgtttacatccgtttatcttagcaccctggaattcaattgagtgtttagaaacctcagaggcccttgaggttttccctgccaagatacttttcagtctgagtttctgctgtagggtggagccggcgtgtttacaaacactccctgcccttccctgccacctccccactctcctcctctctggctgcgctccctaacagatcgggaggtgggagcggggccaggccagaagagctggctgcctgcaaggctgtcccctcccagtgccgccccgcccccgcggtgcctgccttcctaatttggtgtgcattcgcctcgccagtcctcattggccgtggagtggctggctcggtgtaggccgggctcgcccagggcccctcattcccaggagtcgggagtggcttgggagcggctttttcctgggggagcctccctgatcagctgcccctgcccccgccccccgcgccaccctgcgtccttcctttccgtttctcgcaggccctcgctccttttcccagggtgggtgggtatgggtgtgggtgtgtggttttgtgtgtgtgtgtgtgtgtttctgattgatttttttctgccctgaagtactccacccagaaaatgaatgaactctctttgaaataaattctgctatctttagcagaagtttgaccttttctttcctttttgcaaagaaggatttttacaggccaggcgcccggtggctcaggcctgtaatcccagcactttgggaggctgaggcaggcggatcacctgaggtcaggagttcgagaccagcctggtcaacattgtgaaaccccatctctactgaaaatacaaaaattagccaggtgtgtaatccaagctacttgggaggctgaggcaggagaattgcttgaacctaggaggcagaggttgcagtgaaccaagattgcaccactccagactgggcggcagagcgagactccatctcaaaaaaaaaagtgtttttaggaaggaattaaagtatttaatgaaagaattcaagtagttaatcattttctaggttccatcagacagacaccagtctaaaaagtgttccttagaggtagagttttaagaaaactgctgaaattcagtgaaaggacattgcacagagtgactgtttttgctcatgagggcaagacttcaagagctgtttctcttaaggctcttcctgatttctccaacgtggagatcaaaaatgaaagtaactcgtacaattcggcgaaggtcagcagtatgtaaatatacagtaaaaatgcagcaactgacttcaaaatctttcccttttaatcatgatttttaaacagttctgtcttattgctagataacattcagtcctaacttggtttatgttgttttgtaaagttagaggtcttttgagtttggaggttattggatctacgttagaaatactctcctttttctgacaactttggtagcttcctgcagggtgattcatctctttcaaagtttctggttggctgggtgtggtgacgcactttgggaagctgaggcaggaggattgcttgaggccaggagttccagacaagcctgggcaacatagtgagacccccatctctaaaaaaaaaaatttttttgctaattagccaggtgcagtggctcatgtctttagacccagctactcgggaggctgaggcaggaggatcgcttgagcccagcagttggaggctgtggcgagctatgatgtcaccactgcactccaacctgggcaacagagcaagaccctgtctcaaaaaattaataattaaaaaacacaagtttgtggctgcagccttccgtgtgttttcagcagggctgcaggaggattgtggtgcgaatgtgtgaatcacccctagcgggaatcctgcctggctgatctgggctggctgtgccagcatttgcaaatccagtgagggtccctcttcccttgtctgcctgtccctgtccctgtaggccttgctgcccctccccaccccaccacaccctcttatgtcttttcccagctgagaactctggggaagtaactattgtttcctccacatgggaaggttgggactttctgtcttccttttatttttccctcctgcctagatcccttcgaggggcaactttggcgctaaagtgttgggagttcggaatgaagcttggtagggaagtccttgtgtttgtccgaatctgttgaaaggacatccccacgcccgcgtttcctgtaatctcggagggtcctagcgcccgacttctcaggtcagcctcgggtgacaagcggcttgtgtggagtaggcctgttgcatggcttctgtgcgggcatgttacgcacgaggacagccctttccgggttccatgagcctcaggggaagcaggaggcgcctgcagacacggagctgaccccggaacctgcctagctgcggggccgcctctccgctcaagcacccactcagctctgtgaggtctatgcctaacatgagagcagctcctgttgaagccaccatgctggttattctcaccagggcaaagtgcacttcagagacaagttaattttattttctaaattattatttttaatgctggttccaatttgggtttggggggttgattttgtttttgtttgtttgttttttgggacagggtctcactctattgcccaggctggagtgcagtggcacagtcacagctcactgcaacctcaacctcccgggctcaagcgatcctcccactgcagcctcctgagtagctaggactacaggcacccaccaccacacacacccagctcattttttattttcgttgagatggtgtcttgcccaggctggtcctgaactcctggcctcaagcagtcttcccaccttgacctcccaaagtgccaagattacaagcctgggcctgtttttgttgtggttgttgttgcctttgttgtttttgttttgttttgaagcagggtcttgttctgacacccaggccggagtgcagtggtccggtcacggctcgctgcagcctcgacctccgggactcaagcgatcctcccacctcagccgtgactacaggagcaatccactagttaatttttaaaaatagcttcccagcattttacaatgtcggatttatcttaaaggaacacattctttaagatcattctaagaaattcgcctctgaaaattttctttccctatttgtttatttttcctttttcagattacgaagagactatctatctatctatatgcatcttacaaaatgcaaacatttcagaaagtgaaaattcccccacacaacgctccccagagctgagcccttctctctcacttctgtgtctctgagtcgtattcgtacgtgactgtctcttggtttttccgttttagatattacacatgaggttcctatatggaaattaaggatttagcttcccccctccccatcccagtaaagttacatcatcatgtctggtttaccttgcatgagcgttttctgtattagaactgtgtagtgattgtagcgcttagccatttccttccttgtacttttggcttatttccgccacactccccccgctcttggggttaataatggcctcttctccctttactgtgaaggccttcctctggggcccctctgaccatgggatcatcttctccaccatcctgggaatcccctcaggaggtggtggtggagagagggctgtttcctgattcccacgtcttcctctttcctgatttgttcctttgttttaccagagtccatcccccagtcgcttcctgggaaagggcacaggagacagacttttcatttattcactgatttaagagacaaggtctcactttgttgcccaggctggtacttctgggctcaagcgagcctcctgcctcagcctcccgagtagtagggactacaggtgtgcaccaccatgcccggctaatttttgtattttttgtagaggtggggtctccccatgttgcccaggctggtcttgaactcctgtgctcaagttatctgcccacctcagcctcccaaagcgctgggattacaggtgtgagccacctcgcctggacccccaggttcctgtccacgcttctgggactggctgtgcctggcgggcctctgagctgagtctctcatgcctctcctttcctttctctctctactttctgagggattttctccagtctctccttccaccctttcttggatttgtatttctcttcttttgaattcttattttttaatttgaagagcgtgttcttgctctgcaggtgtgctttgcatgctgttcttactgtcctacagagacggcatcgttacctccctagggacgggaaccatgtttcatctcctcccaagctcccgtaggcttccctgggtccctcttctcttctgttttgcaccatgttccacctggtagaagcttcctcaaaccacagatgtgccttggccggctgttgtgtttaacagtgaggtcctaaaaaccctcttagagcggctggtattggagcaggggctggggcagggaccccaagcgtcctcctctgcagggaggttcccccaggaggcttcaggtgccgccttgggacgcaaaggtcatcgcagacccccgcagccttctcgcccctccactgcccacaaggctccgtcgcagctccttcctccagcccctccaggcgggtccctctgtgtctctagggcttcaggagggatcaggtcccttctgacagagcactgtcctccctgggcctgccggaagcgataactgtcccgaccctaggcctctcagggtggccttctcagcctcagagcagagccaagggcattgagggtggactggaaggaccgcagccctgtgccctggggaaggcttgtcttaggctctggggacggagcccagctggcggctccagaggtggctttaggtctgttgttggatttgcctttctcagcgtgacttctcatcataacgtgacccagcgacctgtgtgtcccacagcccgtccgtccctctgcagtctccctgcactggcatgtcctgggtggtcccagtggcaccttctaggcccggcccctggatgcggtggaggctgcccggggtgggtcagcatggggttgtccctgtgagcacagctccgggagacccgtactcagaatcctccagctctctcgcctgaggcggaaatgtgacttgggaattgtcctccatataaaggaagcaaaatcagggcctaggggtgagctgcttactgtgcttcttccctctctcagcctccaatcggggggcacaggcgtttgattcccgcgacgtctgtgggctgtcactgtccagcctctgcgtcccacacctgggcagctagggactggggggggcctgaccgaggcctggggtacttaccccagaaggagtgattccctgtttcctggaattgagctggtggtccctgtcagggagcagtggggtcccctcagcttcctgctctttctcattcccgcaggaggaaatgtgtgcacgtgtatgccgtcgttttcagcactttttttttttttttgagacagaatctcgctctgtcgcccaggctggagtgcagtggcacgatctctgctcactgcaagctccgcctcccaggttcacgccattctcctgcctcagcctcccaagtagctgggactacaagtgcccgccaccacacccagctaattttgttttctgtattttttagtagagacaggatttcaccgtgttagccaggatggtctcgatctcctaacctcgtcatccacccgcctcggtctcccatctttttttttttgagacagagtttcactcttgttgtccaggctggagtacaatggcataatctcggctcactgcaacctctgcctcccgggttcaagcaattctccttcctcagcctcccgagtagctgggattacaggcatgcaccaccacgtctggctgattttgcattttcagtagagacgggatttctctaaatcgggcaggctggtctcgaactcctgaccttaggtgatctgcccacctcggccccctcaaagtgctgggattacaggcgtgagccaccgtgcctggccttcagcacttttttttttttttttttttgagatggagtcttgctctgtcgcccaggctggagtgcagtggcgcaatctcgactcactgcaaactccacctcccaggttcatgccattctcctgcctcagcctccagagtagctggtactacaggcacctgccaccatgcccggctaattttttgtattttttttttagtagagacggggtttcactgtgttagccaggatggtctcgctctcctgacctcatgatccaccctcctcgggtaatcccaaaagcattgggattaccaatcccaaagcactgggattacaagcgtgagccaccgtgcccggcccagcattttctttagattgctaagggaatgtttccgtggactcccagcatcagacatgggatgtcttgattagttttccggacggctccaaggcctctggctttggagctgggtgtcccatcccaccctggctgggcgccctcagacctgtcttcccccagggcactttacagctcttagcggctgtgaggctcgagcagcctctgcttcccgcctccgtcagctgcaggcctggtatcgggggccttggtatcaggagcctggtaccaggcacagccccgtggccgaggcccgcctgcggaggacagttgaatggggcttattgagagacgggctgctccgagggctggaggagccatgtgaacaaacacatgtggtccctcagcccaggtggctggaaaacctcagaagctgcgctgtcgtacctgtcccggctggagtgacaccaggatccggcagcccaggccaggtccagtgctggggaaagtggcggagaaaccaccctactctctcgcctgtgggagccaggcttcgccaacctttcttatttccacttgaaatcattctctggggaatgacaacttttcctgtgggttttactccatgaggttttttgtttgttttttgagataaggtctcactctgttgcccaggctagagtgcagtggtgtgatcatagctcactgcagcctcgacctcccaggctcaagccatcttcctgcctcagcctcctgaacagctggaactgcaggtgtgcattaccacgcccagctaatttttaaaatgttaaaactttgtttatttatgtatttatttatttatttttagagacagggtcttgctccgccagagtgcagtggcacaattatagctcactgtagcctcaaactcctaggctcaagcagtcctcctgcctcagcctcctgagtagctgagactacaggtgcacaccaccacacctgtctaatgttaatatttttgtagagatgggggtgtcactatgttgcccaggctagtttcgaccatgtgggctcaagcgatcctcctgcctgggcctcccaaattgctgggcttacaggcatgagccaccgcacccggcagacatgaattttctatgatcttctgcaaaataactgctgggaacaggagcaggtccctgccacacgtgctgggccatcactgtttgttgtggagtgctggggggtgcccctcattggtcctcaggaaggatccaggagcccgcctgccacctcatgggcctcggatgagattttccgagctgagtggccattccccagcctgtggccggagatcagagtgtatgtgagtgacacctcggctcagtggtccccagcaaggactgacatttcagttcttcctgctgagtccaagggggacgtccagtggctttgggtctgggaccgggtgcacaggcgtgtgctggccccattgtctgcagcccctccggccatgaggccatcctgcctcagcagggaggtgtttggttcccagaggcctttgacaaagccgattttgggggctgtgtgctgttaccagtcaaaacctttctctccccttctcatcttacttgtaaacttgggttttgtattttggattcagaactaaattcagaaaaggtttccttttgactgtttcctacctcgatcgagccatttgtgggtgttcatttaagtttcgacacgtgtggaacttacctatctctgccatatttggggagtccgttgtaagagagaatgggaattccagatcagagtccttaacgttccatgtgggtgacactgagtccttcctgaaaatgccccagacctgaactgatcattaatgtcagctgtcaggtttttctcagccacaggatttttttcattcattcctctgctccatccaaaaaatgtttcttgagccccgcctgcacccaagggggctcctacttaacctaagttttggagatctaggagtcttgtgcctggacagttagggaaggatgttcctggcagaggaaagggcagcaaggcgggaggaggagaatggaccttctggatggttctggatggttctgggtggttctggatggttctgggtggcctgcagggcagtgcagcagggagcatcctacccgccacgggggctctaagtcagctgagaggggggatgtcagcatcacaggtgggcagggtccatctcaggacggggctaggtgggtgcccgtgagctcaggacagtgggatctctttctctcgggaggttctgcacccactcttcgtgtcttcattggctttctctgaatacctgtaatagaaatcattttcagaagcaaaacatcgccgtggtttgctgacggaagcctgccttagtgagttagggaagcaggccagagcacacccctcagccggacggacgcagcctcctgcctgtggtcccggcctcaacccagagcctcacctgcagccgggggtgtcggtcactcccagccatctgtggttgctccagcctgggagggagaggggatgagggcaggggcatctcagcggctcagggcaaaactgcaggggtcatctcttcccgagggcggtgtctccaggagagccacctgccacgccttcaccctgcagggcgatggcacctccacagcctctttccaggatctgcctctgtgaccacacggggttgtcctgggcccgagccttttcccacagcgccgccttgtggacacctgtgcaggagccagcagcccgcggaggctacctgctccgggtgcacatcctgtaggggtgtgtgtggggggacctgaggaggggccccacagagctgcctgaccaggtgctgccctgggccctgcataatggcaggaggagggcccgcggtgctctcagcccccgagcagaagtcaccactggaaggaaacttgcctgccgtttccagcatcttgtccccgccgctgcgtgaccttggccgggcagtgtggtggcacttaaaattggaaagtgtgagcttcttccccacagccccaccctctgggtaggtcctgaagccctgagccccacaggggccccctcttcagagccatgaacttacagtgtccttctctctcctcagtgtccccaactcctgcccagccagtccacgcggtgccggctcctccagttaccgctttgtgcagaacgtgacctcggacctgcagctggcagcagagtttgcagcaaaggccgcgtcggagcagcaggcagacacgtctggaggagacagccccaaggtctgagcccacctggcgccgtggtgcacctggtgacccaggatcgggccatagtgacccggcgcgggcggcacagacagcccagggcctgcgggcgtgtgctcgaggtggtctcagcccacagggaatggagccgcagctggcggtagagccgtcggccctttctcgttttcgtgcccaaatcatccccgttggtcatttgctggtgacaggggtggcgccgtcaccgagggcccctcccgccacgctccttgttcatctgccgctggcagcccggcgtcaaagccttcatacagcccttgagcaggatggcgttctccttataactttgtcttagttcatttttgtccaatagctgttttcaaattgatttctggaagaggtgagaaatttcagaattaaattataataaaaccgaagttttccttcccatgaggcaaaaatggttgttcctagttgaatgcaagcacattaatgggatagttggagggcactgggacgggtgccggcaagacgcgcacattctcgtgggaaggttcctccccatcagctgtgacgggtgggtggggtagactcagggaccttgctggagctcatcccgtgagccgtgtttctccgcaggatgagtcaaagccgccgttctcctacgcgcagctgatcgtgcaggccatctcctccgcccaggaccggcagctgaccctgagcgggatctacgcccacatcaccaagcattacccctactaccggacggccgacaaaggctggcaggtgaagccgagtccccagggccggatcgcctctgaaggcccttagaacatggaactcacaggcatattgcttcccttaaaacagaagagggccagtgagggggctcacgcctggaaccctagcattttgtgaggccgaggcaggaggaggatcaagaccagcctgtgcaacatagagagaacctcttttctactaaaaattagctgagtgtggtggtgcacacctgtggtcgcagctactcggaggctgaggtgggaggatcacttgagcccaggaggtggaggctgcagtgagctatgatcacaccactgcactccagcctgggagacagagaaagaccctgtgtctacaaagaaaaaaaatatctttttaactaagaagataaatataaaagagggatgttttcacgaatggcatatggtacatctgaaaggcattagcgctgtgataccattgtgtctaaatactcttttttattagtttccttcttctgagccccagaactgagaagatggatctacaccttgttagatttttgtgcttgctgtgcctcacaatcccacgttaagttggaaaaatgtaccatatactgttattcaaacaatccacatgtctgaattgtggatggcattttaagagctttgtccacaccagccatgactgatgcatgttgcatttgcctgtattttctccaatgtcagtgtagcgcatccactagctttggttttttgtttgtttgtttgttttttgagacaggatctcgctctgccatcccggctggagtgtggtggcgcgatctcagctcactgcaaccttcgcctcccaggttcaagcgattcttctgcttcagcctcccaagtagctggggctacaggtgcccaccaccacacctggctattttttgtatttttagtagagatggggtttcaccatgttgcccaggctggtctcaaactcctgacctcaggtaatcctgccagcctcggcttcccaaagtgctgggattacaggcgtgagccactgtgcccggccaagacccagtgttttctttctcccagatgtgctcctagaccaggatctgtctttctgtttcactttttctgtaaagaatggtaatggcagccaggcacagtagctcatgcctgtaatcccagcactttgggaggccgaggtggaaggattggttaagcccaagagtgtgagaccccatctcaactaaaaatacaaaaaaatcaacccagcatggtggcccacgcccatagtcccagctagtcaggaggctgaggcaggagaatcccttgaacccgggaggcggaacttgcagtgagccgagatcgtgccactgcactccatcctgggcgacagaatgagactccgtcaaaaaaaaaaaaaaggtaaaatggtaattatgcggtgtcaaattttgataggaatgacctgccctgtgcctcggtgctgctcccgtgaggcccagccagcacagcaccaagggctctgcacagagggacggcctcccctcaccctggtcccgcatctgctgcagatttgaggtgggtgggactcattttctgatttgctggtgatgggtgaatatctctgcttccctgcagaattctatccggcacaacctctctttgaaccgttactttatcaaagtcccacgttcccaggaggagcctgggaaggggtccttttggcgaatagaccctgcctctgaagccaagctcgtggaacaggcattccggaaacggaggcagaggggtgtctcctgcttccgcacccccttcgggcctctgtcctcaaggtaaagttctctgagcgcccgtcctccagctgttaggaaagctgagctgccctggagtttagagatacgtggcgcagtcagccctccggatctgtgggctcaggctcagtgtacgggcatgcaactgatcacaggtcaaaaatattccaaaaaaaagaaggccggcgcggtggctcacgcctgtaatcccagcactctgggaggccgaggcaagtggatcacctgaggtcaggggtttgagaccagcctagccaacatggtgaaacccctgcctctactaaaaaaattcaaaattagtcgggcatggtggcaggtgcctgtaattccagctactggggaggctgaggtaggagaatcgcttgaatctcggaggcagaagttgcagtgagccgagattgtatgtaccactgcactgcagcctgggcgacaagagcaaaactccgtctcaaaaaaaaaaaaaaaaaaaaaaaaaaaaaagtaatacaaatgaaacaatacacactacaacagctgtttacatagcaggtacatttgttagggattataagtaacctggcgatgatttaaagcttacaggaggatgtgcacaggttgtatgcaaatgcgacaccatttctatgaggaacttgggtaagcatctgcagatttggtacccacaacccccgcccctcaagtaccgaggggtgactgctggtttcggcacttaaagactgcaccattttctgtttttgttttgagagaatatctcaggaccaagaactcctaaaatagtaaggttactaagtaagccactgactgttgtattaaaaataagattttagttcttagaagtggaaatgtgtgtagcaataggaacggttcctaaggccaagaataaatggattgcggttgtgggtcttttggtagcactaagctttctgttgcagtgtgtgagaggacccggggagagcccaatcttcgaagggacagatgaggggtatgacctggggagcccacaaccgcctttgcttttcgcagatgctgggaacgcagctctgctgccggcggggtggacagaccctcccccagccattgctgcccacctgctgcgtcagggcctcccctgcccagctcagtcttggccaagcccagtctggaggagcatgcaccgcctgtgagcggtctgggcagcgcttcccaggttgcccatcagatgagcccgtcccaggtgtcgaggaggagatctcctgagcggcagtctcggaaatccttccccgtggaaggacacgttaacctctcgtgcttcccatttcaaaattctgtttccaacacgatttgatgaaagattgaaatatctgaaaattcatttcgagcacagggtctggcattgtgattctcaggtgaactgggcgtatggttgaggtaggacttcaaaaaagtgttcgaacgtcatttgcagcatttaaactgagctccaaatgacgttcaaacacccctctcgggtagagttttcatggtggaacggttgcgcccaccaaacagaagcttatgtttttggcacagaaggcctgggccattttcatggacacctggctggacctcggtggaagtgaactccgtaggttgttgcgttcactgcagcacctcacatgataccgtcccctctcatggaacggagcctcccccatgcagcccccactcaaatggagttttaaaggctgggttcaggttacgggggcgtttctcaccgtctgaatgcggaggacagagacgagctccagggagcgtgggcgggtgacggcgctgagatgcgtgatgtctcggaaacgtcctcgcatccctcagcgcgggcgctgactgccgcggcccttgcctgtcttccaggagcgctccagcttcgcccacacaccccgggctgatgtcccctcgctccggcggcctgcagaccccagagtgcctgtctcgggagggctcccccattccacacgaccctgagtttgggtccaagttagcttctgtcccagagtaccggtattcccaaagcgcacccggtaaggagcgggcggccctcttgcggggcggggcggggcgggactcgtgggggtgcgggaggggtcaccgtccgctctccgccctccgtgcaggctcccccgtcagcgcccagccagtgatcatggccgtgcctccccgaccgtccagcctcgtggccaagcccgtggcctacatgcccgcctccatcgtaacctcacagcagcccgcgggccacgccatccacgtcgtgcagcaggcccccaccgtcaccatggtcagggtggtcaccacatctgccaactcggccaacggatacatcctcaccagccagggcgcggcggggggctcccatgatgcggcgggcgcagccgtgctggacctgggcagcgaggccagaggtaatgcagccgcggctggcagccttcgcaggaccctttgtggtggtcccggccggcaagtccccaaggcagcgccattggcctgggcctggggcttgaggaggatgattctctgcttctgcctctcgctgccttgtccctttaaatcagcatgagctgggcaggtggctcatgcttataatcccagtgctttgggaggccaaagcgggtggattacttgaggtccggagttcgaggtcagcctggccaacatactgaaaccccgtctctactgaaaatacaaaaattagccaggcatgatgatgcgctcctgtagtcccagctactcaggaggctgagggaggagaatcgcttgaagcctggaggcagaggttgcagtgagctagactgcgccactgcactccagcctgggcgacagagcaaaaccctgtctcaaaaaaaaaaaaacccatgaatctccgcagatgtgtccttccttgttgaacagggccctcggatgcacatagctgtgtccttgccctaaggtaacgttaaattgagttgtgttgcggccttgcatgcatttggaatttagtgttttctgcaggagaaagaatgagcctgggaagactgttcttttcgactccctcgtaagttaaagactttagaagtcatttagggaaaaagtagttctgaattgctaaaagaaatccgatcccagggcttgacggggtagacactgaacatgcagctgaccccagaagctcctctccggaacgcctgcagttaggcagcgccctcctaggccactctccaccctggacttcctctccgcggtggtgtttgtttcaatgctgccgtaatgaaactgcagtttggtgagggaaggccaagttacagctgtaatcaggatcatttcattccaagtaatacgttttctttctcagactaaatttgggttggttaaagctaaggtatttaaaatactgttctaggccgggcgcggtggctcacgcctgtaatcccagcactttgggaggctgaggcaggcagatcacttgaggtcagaagttcaagaccagcctggccaacatggtgaaaccccatctctactgaaaatacaaaaattagccgggtgtggtggcaggcgcctgtagtcccagctactcaggaggctgaggcaggagaatcgcttgaacccgggaggcggaggttgcagtgagccgagatggcacccctgcactccagcctgggcgacagagcaacaaaattctgtctcaaaaaataaataagtaagtaaaatattgttctaaaaccctagtaattttcttcccaaacctatttcacccatgggattttcctctagcaaacctattttttcccagtgccgacctcactttccccacttgtccgacctgctgcccaggcgtcgaggaaatcgattgtctcgttggccgagtgtggtgctgacttggttcctgtcccgcaggcctggaggagaaacccaccattgcgtttgccacaatccccgcggctggtggagtcatccagacggtggccagccagatggcccccggggtccccggacacacggtcaccatcctgcagcccgccacacccgtgaccctcgggcagcaccaccttccagtccgggccgtgacccagaacggaaagcatgcggttcccacgaacagtttagccggcaacgcttacggtgaggccctggccctgttctccatgccacatcccaagctctgtggctcccagtagtcagtgcggcatgagaatgttctcccagtatctcccgatcctccactcagttcaatttattgagcacctgctatactccaggcactggggtaatgcaaagaaaaagagggtggaaggggccacctatcatcccagcaccttgggaggccaaggcaggcagatcgcttgagctcaggagttcgagaccagcccgggcaacatagcaagaccccatctctacataagattcaaaaacttagccaggtgtggtgttgcacgctcatggtcccagctgcttgggagagtgaggctgtagtcagctgtgattgctccgctacctgccagcctgggtgactgagcgagaccctgtccctttaaaaaaaaagtggggggaaagaaaacagggtggaaggaaaacccagatctgcccactctctggagctcacactccatggggtgaggcaagaggtcaaaggaaggaggagagttggggtgctggggtgcaagggtgctgggcgggggtgcagggtaccagggcaccgggcgcattgtcagtggggtggctcagggcagtgcatctgtgtaaaggagtgaggcaagccgtcgatgtccagcaggatctagacagcaatgagaggggcctccacccaacaggctggagccagcagagacagggcagatgaggtggggaggggacggcagggcccgcagggagcagagcaagggtagccgtcctgcctggcaggggtgcactgacctccggttccggcttggtggcttagcccctgtataggggacttgaaaaaagcagctgggtcctaaccagaccccagagtaaccctcttcttcctccactccagccctcaccagccctttgcagctccttgcgacccaagcgagttcatccgcgccggtggtggtcacccgggtgtgcgaggtggggcccaaggagccagcagcagccgtcgcggccacggccaccaccaccccagccactgccaccaccgcctctgcctccgcctcttccactggagagcccgaggtcaaaaggtcccgggtggaggagcccagtggggctgtaaccacaccggctggagtgatcgcagctgccggcccccaggggccaggcaccggggagtgaggtcacctgcaacgcgggggagtgggactcacccagcggcgaccccgaagctggacccggcagctcaggcggccgcacccacagacggaggagaacagcccgcggcggcctgtgggcatcggcggcacctggacacacccagccctttccatttgatcgcctgccttcccgtggtttaagacaaaaacacataaacaagttcagacaactgattgtatgattctgggaattctttgctttcctttccttctccctcggcaccacctcctctccccaggcctccctgtcgggcatggggaggaggttggagctcagcatcttgaggaatgtgtcaagacagcccctccgctccgcgctgcacggccagccgcctttgtccgggaggacagacagaaacgcagcaaggcacacaccaaggctgccggggaggcccgggcaccggacagatgcctgttgggaagccaggagctgccgagccacggaccacctaacagcctctccgcccggaacgtgacatagagagtgttggcattaactcggggggtgtccgatttcacttcagaccccaagtttttctttgtttgtttaaacatggaattcagacttcattgtacacctgagacagacacaaaagggatcatgtatttttgaggattttacctgttgacgtctgatgaccggccgtaggtccagggttcccgctgggtttaatcccctcgaagagtaaacctgccgctctgtctgataacttcaagtaagagcagcggcttcctgggttggcgttcgcggtggaaggttcctaggatgaaaggtgagcctggatccgccggccgcagacatcgcgctgctggggacgattggggccgctgctctgcagaccagaccttcccgaattatccgtggctccgatgtcccggtgctgacggccacatggggacctaacagtgccaaacgccatctgctccagctgctttttcacccagttgcagagtcctcaccactcccacattgatctgctgttttcaattggaaccatttctcctgcctgaaactccagggcccctccctgggctgtccgtgagcaggagaccccaccccagcagcagtggtgagcaggcctgtgcctccacgcccagcccccgccaacgcgactggttttgtttgccacacggtgagaaccggaggacgggatgctccagccagttgggtggttctggggtccctgaggaagccccctcctgcacttccattaagacagccagtggttcctggatctttgtcaccaagcagcgttgagccagagctgtctaatgctgagcccagctcaggaaggagagaggagtccttcagtgtgtcttggagatgcgaagtgcgtcctcgtaaaggtcagctgtcagttttgctggccgctccggcgctggctctcctgtccgggaccacaacgagaaacagcgacagattcgacgcagagctccggaagtgcctgaggagcagtggttcttggaaatcgcccgtcctccgcatcacagcctctcaccagcaaagcagcctctgcccaggccctggcgggagagctgcagagggacccaggtgcctggagggcatttgagggaggtggctggacaggtgtctccctgaagaagaagggagaacacttttcaaagtgattccgaggcagtgcgggaggacacacgtgctgtgcagtggagtggggtcgcccgtggcccccatcagagtccccgtcccccaggacaagtgcagaacctctgtgggccccctccttccacctagatagagaaaaccccttgttcggtttccttcccgtgtcccgttgtttttctaagccccccgaattgagtcgtttctatggcactaacctttccatgggaaataagctctttgtggaagtccgtacctgttgccctgggtgaggtttcagagaaacgggggcaggatgaacacagccggctgtcctgggtgcagttacgtccgtggagggtgagagattgcgccccgttccacacttgtgtcgcctgctgttgtctgtgggccttttctttccgtggtgcctggtgtgtgcgtgcatggcgtgagagaacggggggtgggggttggaggtggctccccgacaccggtgcctgtgtggcctgagccggcgccctcccgggagcgcccgtcacggggggcctctgtgattacctgctgctgctctctcccgcgtggtgactatatgtcctcagggctgcctgtggccaccctgatgggagacctctgtttgcttctgggccactgcaggttggcctcctcaatacaagctgatgtctgcagggagcgccgcgtgctgggattgcaccacgtgttggtcacaaatcgaggtcgccttttggcctggtctgctcaggctggccctgacccacgtggtttcctggcttctgagacgcagcgcattcttcctgttagcggtagcgttctctgatttcactgcttcattgccaagggcgtggaaagggggtggtggatggagccgggaggtggcgagcacaggaccccggggctgcattctgccgtgtggggttctgcactgtctagcttctgcggggactgcaaagagggatgaagggacgtggtcctaggggtcggctcagactcggagcagggcagggagaggagggcaaggagaggaggcctgggtcctggatccactgctctgggctcataaccatgagattttgaaagagtttttggtcatctgagcaggtaccatgcctggctcatgccggaacttgtcttggaaccggtagccagaggcccaggaagggacagggcccaaaagggttgcatgtcccggccacaaagccctccctgtgtgccctgagccagcccagcaagcgcctcccagccaggcgctttcgcagaagcaagagcacaggccagggggaccgggagagcctcagcccccagcctgggcggcctgtgaccctgagccgtgtggagccaggacccaagaaccttctctaggttctcaagggtgagctgacccgggcaatgtgcaggaatgtggggagcaaaagtagctgattccagccccgttctggggtcactggggaggcagaggctgagggcctgttctctggtcaccagggactgggggcacggtccacagcggatgagaacagcaggtcacagtagtggctttgggaagggcccctcctgctttgccctgttcggaaaggggctccctcagagcccctgggcccagtaacccgcttctgtctcctgactcctgctggataaattgccaggtttatcaaatacaagaaaacacctgctttggctaggaggtaagtcccaaaaagaacgtcttaagtagagcaaaggcatccaccgaggccatttggtggcccctgggaagtggggaagcagggcctgagcgtccccaggctgctagggcagcagctggctcagggcacactctctcgtgccagcttctgccaccagcccagtgtccacggagccgcggggccagaggagctcagggagacctggctgtctagggcatggtacccagtatcccggtgtgtgcccatcctcagccacttgtgtctttctttccatgtgggagttctcccggtgacacctgccctccgttgagggtggaatctgtcactcatgcctttgagggacccagatggaccatccctcttctgcttgctttctacattcctaaaaacctcaacgttaatccctcaccagtcgggccgagtgtggcctcatggttctgccgcggcccagtcttctcccactggcttcacgctagagggcgccatgcgctctgggtgaaatgagacgctggtgtggggtccccatgtagagaccctcaggtccctatccagagaccctccaggcagtgctgggaagacactggtggcggggaccatgaccaggcgggtggagccatgtgtgtctcacacctgccgcccctcactttccttcccgaggtctggtaggtcctctttgggatttgctgtttatttgtatctcccttttctttgatttaagaacaatgccaagtgaaaaagctgggaatgaatttctgagttgctgagtgttccctgctcctaggtaccacgctctgtgcttctcaggcagggaggagatggattcggtggagttgggccaggacgggggcttcaccctgccccctccagactgccgaagcccccaagaagttttgagcccagctgggcctcgcctccccggctcctgggtccattttctgtactggtttgagatcacaggcatcattcagcgaatgctcttgtgtcctctgcataaagagggccctccctggagcacccccggggagctgggactctccagaaagccccgggtgagggctccgtcttgagagagagagaaatcccttctttgggcgattcagtgagttcaggaggaggaggaagcttttccttggctttgaaatcagtgtttttatggagacaaagaacagacctcagtgggaaaaatgaaaacgtaatggaacacggggaggtgtcggagaagaaaggattttccccttcgctttcagagccggcgggagtgcaggtctgttttgcttcagaagcctcacattctgctttgcccttgagtgacttcatgcgggatgaggaactgttgacccctctagagaggacaccccaagtccatcctgggctcctcctcacccctctgagaaagcccccctaaaaaaaggcttcagagtcaccggcatgccgcctcacgttgcaggacggaatcgcgcgctcctcacgctggagtaagttacgaaacatgatcgtcaggctctttgcaaacgcagagccccagaacgctggatggaggcctcctcggccctgcgggcggcctggctgcggtaggtctgctgcaaggagccaccacggggactgcgccacactcctgatgaaaacgtgtttacccacagcctcgcctcgagcctccttgacaataccgctgcttcaaagcaatattatttaatgagaatactttacattgctcacatgtgctgctatgaagacaggattagtctgtagacgggactcagctccagaggttcctgggtaatgtattgtggctcttggaaatgagggtagaatttgaaatataacaaatggtctctcgcccggttctgtcccttatttttagattgttttcctgcatcttacaatttccttttcttttcaaagttcctttctccaggcctgtttttcagtgctcaggacacggttttcatcacatacttactgtttttttggttgggttttgatacgaaaagctgctacgtttggtgaccagagggagggtttggaatctgtgctttgcaggggatctcggtgggtaccgcggcccctcgcagggtggcgagtggggtccgtgcctcgagaagggggcccttacccacaccgtgcggcttgaattctgtcggagttgaatctgtggaaaggattgtcccattagagctgctgcgtcctttcctctgtcctccctgtcacccaaaccccgaagtcacagctgcttagaagaatgggattttggggatacaaccacacacatttccctctggactgaaattttaaaaacagacccatttcactgacttctttttttttttttttttttttttttttttgagacggagtctcgctctgtcgcccaggctggagtgcagtggcgtgatctcggctcactgcaagctccgcctcccgggttcacgccattctcctgcctcagcctcccgagtagctgggactacaggcgcccgctaccacgcccggctaattttttgtatttttagtagagacggggtttcaccgtgttagccaggatggtctcgatctcctgacctcgtgatccgcccgcctcggcctcccaaagtgctgggattacaggcgtgagccaccgcgcccggcccactgacttctttagggaaaatagtttcagtcttgggttgtcttgtgagcccacgggcatgggaccctgtctctgctgggcttttccggccccgtcccagctcctcctcaggcagaggctgcagccctcagctctgctgctggatggaacatttcaaccccctccgggaaggtgggcagggtggagggcccagggctaggcctgccatgcaccatgagcaggggtgctacctgggtgtgtgaagttgggctggcttttcctggaggtgggtgagaaggctctccgggcaaatcagaaggccacgagagagagaggagcggggagagtggtgaggaggattcgtctctgactgatgaacctcgccgtgcctgtctgtcacatccaagtctgtgccagctgctgggaggtcagactcctgccctgagaaacagcccagtccttggagaatgaaaccctgagggtcagtgagtggaggccttccctcggggccagccattcccgggaggcctgagtgtgacctggaagctctgtgggtcaccaagactggcattttccttgtatttttgtgcagggctgaagtgagcgttcctcctctgaattggtgaggctttggaaattttttgtttcttctactcatcctaatggctggttttggctgcccggagtatcagagaatatcactaagagggcagtcagtttatttttaggcatctttctttctgtccagggagaaacccctcggaagaatcttagtcactctttgcacctgccctgtcattctcgccatggggaaaatgcgttgaaaagaaaaataccggggccagggagaagccgtgaatgtatttatttgctttggtgaagctgctgaacactggctgcggagggccccccgcccccatcccgcttcaggccccagtgacccagttgcgtcttaagttccatcgtccagatttcaggccaccagaggctgccaaaggtgactgaagcggtctccaagtcactctgtcaccactttttttttttttgagatggagtctcgctctatcgcccaggctggagtgcagtggcccaatctcggctcactgcaacctccgcctcccaggttcgagcgaattctcctgcctcaacctcccaagtagctgggattacaggcacctgccaccacacccggctaatttttgtatttctaatagagatgagagtgttaccatgttggtcaggctggtcttgaactcctgacctcaggtgatctgcccacctcaacctcccaaagtgctgggattataggcatgagccaccgcgcctggcctctgtcactttttttgctccttacccagtttttgttttttgttgttttgttttgttttagcgtgatactacaatggaaagactcctagttggttattctttatctcggattcttttttctggaattgtttgctcatttgagtggttggtggtttgccctgtgtcagacacggtgaaaagagtgcaggaaagctggggccaggggaagcgaagtggcttcaatccgggctgacagccaagaagagttttcctcccttcggtgacagggcctgcccctccgagtctagaggtaaaagcagcttctagaactggcccctaagtctccaaatgtgttggctaagctgaaatgagagactctgaattagagtttttgtttgtttgtttgttctctgcatgaagttcacaggcctgtatggatgttaaattgtgtctatagcctctaaatctccaggttaactggtccagattttttttttttaatcagtaacaatgggaatttaaaatcaaatatttggccaggtgcggtggctcatgcccgtaatcccagcactttgggaggccgaggcaggcgcatcacctgaggagtttgagaccagcctgaccaacatggtgaaatcctgtctctactaaaaatacaaaaaattagccaggcgtggtggcgtgtgcctgtaatcccagctaccagggaggctgaggcatgagaatcgcttgaacctgggagatggaggttgcagtgagccgagatcatgccactgcactccagcctgggcaacagagggagactctgtctcaaaaataataatcaaatcaagtattttaagtttggctcttctttttttcaagaaaggctttttggatacctagaataccttcatgtatgtggcttgatttctgtttcaggaaaaggggggcgggaggagagacaacagccgtgttccagagtctgtcctgagatgtcgctgagtccagacacttgggctgcacgtgccctgcagatgacaaaggccggcagctcagcacacgtgcaggaggggttaaagccaatattgagtttttgttcttgttgttttaatctgaacgattattctcctgtaaaaataatttgggaggggcgggtgttgttcggtgtgtgtgtgtgtgtgtgtgtgtgtgtgtgtgtgtgtatttttttttttacagtggcgcctgtctaaagtatttttcacaacatgtttgataatcagtgctttaaaaagcagcagtgtcctatgaagtggaaatgtcagttctagagcattggatgtgaagttctggtcatgtcaccttgcgtgtctcaccctggaggagtgaaggtgggcgcccggcgggggggtgtggctgcaccccagcaccgggagggggcacgcacgacaccagaggaagggacagccccacccatgtcaacagcaggcaacctgtgttttcatttcaagtgggatacagtatttttttaataaggagccatacttttttttaagagtttgagatctgaatgtgatttctaattgtatcagacgttaatgttttaaagctataacaaagtttaaaatttctactttttgtttttcatttattttaactgttcttttatctattaaattgttgtatgtggatggggaagttttgtttctcctcttagcatttgtttctataaccagaaataaaattctatattaaagaaatgaccctgcggctccggtgtggtccttctgcgcaggtggctactgaaggtggcggacggacagacggcctggacacacagacaccaggcccctggacacataggctcccgaccccctggatacacaaacacctgaccccctggacacacaggctcctgacccccggacacacagacccctgagcccctagacatacaggcacctggccccctggacacagaggctcccgaccccctagacatacaggctcccggccccctggacacacaggcccctgaccccctggacacacaggcccctgaccccctggacacacagacccctgacccctggacacacagacccctgagcccctggacatacaggctcccggccccctagacacacaggctcccgaccccctggacacacagacccctgacccctggacacacagacccctgagcccctggacatacaggctcccggccccctggacacacaggcactgcgcccccctgctccagaggctgaagggcggctgctgataagggaagtcgcccataggtccctggtgtcccgttcctggctcacacaggagatgcttctgcaggtgcctgtggctcctggagtcagtgacccccacccactgagagtgctctaagcgaggatgtttgcagctccaggaatgtgaagacaacgtgtgtctcccctcagacatggcaaaggcagaaaccagctgagccaaccccctgcccctggcacacgcccacatcctggctggggggcacttgcaggtactcgttgctgccccagtggctcctgggcaactgtgggtccttcctgctggcccttggctagatgagaatttctacccatgtccaagatgggtagaaatgtacgtgggtagaaattctctcaggccttacttattgtaggtgtggggcctggggggtggggatggcattgactttggaactacacagacctgggttcaagttcctactgtgtccttaccagctgtgggacttcagcttgcaatgcgccccacttcttcacatgcagcacaggcacccccaccccacaggcctggcgccccgaagctcagctgcgatgccatcagtcactgtctcttctgagagtcccccagacttatgagacccttgggtgtgtctgtgtgactgcctccgacagacttgacagtggtgcatgcttgtcacatgtctctcttctgtcaaggttctgtagtgtttgcatgtgactccctcagttcaataacttgcatttttccgatggcacagttacccaccattgcaggtaaggtttcactgcttctctgtcttccttcaagttactccatttccattgtaagaggttaacataactttaacagattagttctagtttaagatgtcagcccaggctgggcgcggtggctcacgcctgtaatcccagcactttgggaggccaaggcgggtggatcatttgaggtcagcagttcaagaccagcctggacaacatggtaaaaccccgtctctactaaaaaaaatacaaaaaattaactaggcatggtggcttgcacctgtaatcccagttacctgggaggctgaggcaggagaactgcttgaacccaggaggtggacgttgcagtgagctgagatcacgccactgcactccagcctgggggacacagcaagactcagtctcaaaaaaaaaaaaaaagaaaaaaaagaaaaacattttagcccaatagcaaacatgagtgagaagcgtatgtaggcttcctccagggatctgcgttggctaattattaattgcatctttcctttttaagatgttgtctttgtgtttgtttgtt

SEQ ID NO: 937 - DNA, 2735 bp, Homo sapiens
gcggccgcctcggtacggcagagcccggggccggcgctggcgcggctggagggccgcgagttcgagttcctcatgcgccagcccagcgtcaccatcggccgcaactcgtcgcagggctcggtggacttgagcatgggcctgtccagcttcatctcgcggcgccacctgcagctcagcttccaggagccgcacttctacctgcgctgcctcggcaagaacggcgtcttcgtggacggggccttccagagacgcggcgcgcccgccctgcagctgcccaagcagtgtaccttccggtttcccagcacggccatcaagatccagttcacttcgctctatcacaaagaagaggccccagcctccccgctgcggccactgtacccccagatctcccctctgaagatccacatcccggagccggacctccggagcatggtcagccccgtcccctccccgacgggcaccatcagtgtccccaactcctgcccagccagtccacgcggtgccggctcctccagttaccgctttgtgcagaacgtgacctcggacctgcagctggcagcagagtttgcagcaaaggccgcgtcggagcagcaggcagacacgtctggaggagacagccccaaggatgagtcaaagccgccgttctcctacgcgcagctgatcgtgcaggccatctcctccgcccaggaccggcagctgaccctgagcgggatctacgcccacatcaccaagcattacccctactaccggacggccgacaaaggctggcagaattctatccggcacaacctctctttgaaccgttactttatcaaagtcccacgttcccaggaggagcctgggaaggggtccttttggcgaatagaccctgcctctgaagccaagctcgtggaacaggcattccggaaacggaggcagaggggtgtctcctgcttccgcacccccttcgggcctctgtcctcaaggagcgctccagcttcgcccacacaccccgggctgatgtcccctcgctccggcggcctgcagaccccagagtgcctgtctcgggagggctcccccattccacacgaccctgagtttgggtccaagttagcttctgtcccagagtaccggtattcccaaagcgcacccggctcccccgtcagcgcccagccagtgatcatggccgtgcctccccgaccgtccagcctcgtggccaagcccgtggcctacatgcccgcctccatcgtaacctcacagcagcccgcgggccacgccatccacgtcgtgcagcaggcccccaccgtcaccatggtcagggtggtcaccacatctgccaactcggccaacggatacatcctcaccagccagggcgcggcggggggctcccatgatgcggcgggcgcagccgtgctggacctgggcagcgaggccagaggcctggaggagaaacccaccattgcgtttgccacaatccccgcggctggtggagtcatccagacggtggccagccagatggcccccggggtccccggacacacggtcaccatcctgcagcccgccacacccgtgaccctcgggcagcaccaccttccagtccgggccgtgacccagaacggaaagcatgcggttcccacgaacagtttagccggcaacgcttacgccctcaccagccctttgcagctccttgcgacccaagcgagttcatccgcgccggtggtggtcacccgggtgtgcgaggtggggcccaaggagccagcagcagccgtcgcggccacggccaccaccaccccagccactgccaccaccgcctctgcctccgcctcttccactggagagcccgaggtcaaaaggtcccgggtggaggagcccagtggggctgtaaccacaccggctggagtgatcgcagctgccggcccccaggggccaggcaccggggagtgaggtcacctgcaacgcgggggagtgggactcacccagcggcgaccccgaagctggacccggcagctcaggcggccgcacccacagacggaggagaacagcccgcggcggcctgtgggcatcggcggcacctggacacacccagccctttccatttgatcgcctgccttcccgtggtttaagacaaaaacacataaacaagttcagacaactgattgtatgattctgggaattctttgctttcctttccttctccctcggcaccacctcctctccccaggcctccctgtcgggcatggggaggaggttggagctcagcatcttgaggaatgtgtcaagacagcccctccgctccgcgctgcacggccagccgcctttgtccgggaggacagacagaaacgcagcaaggcacacaccaaggctgccggggaggcccgggcaccggacagatgcctgttgggaagccaggagctgccgagccacggaccacctaacagcctctccgcccggaacgtgacatagagagtgttggcattaactcggggggtgtccgatttcacttcagaccccaagtttttctttgtttgtttaaacatggaattcagacttcattgtacacctgagacagacacaaaagggatcatgtatttttgaggattttacctgttgacgtctgatgaccggccgtaggtccagggttcccgctgggtttaatcccctcgaagagtaaacctgccgctctgtctgataacttcaagtaagagcagcggcttcctgggttggcgttcgcggtggaaggttcctaggatgaaagg

SEQ ID NO: 938 - protein, 608 aa, Homo sapiens
MRQPSVTIGRNSSQGSVDLSMGLSSFISRRHLQLSFQEPHFYLRCLGKNGVFVDGAFQRRGAPALQLPKQCTFRFPSTAIKIQFTSLYHKEEAPDLRPLYPQISPLKIHIPEPDLRSMVSPVPSPTGTISVPNSCPDRGAGSSSYRFVQNVTSDLQLAAEFAAKAASEQQADTSGGDSPKDESKPPFSYAQLIVQAISSAQDRQLTLSGIYAHITKHYPYYRTADKGWQNSIRHNLSLNRYFIKVPRSQEEPGKGSFWRIDPASEAKLVEQAFRKRRQRGVSCFRTPFGPLSSRSAPDTHPGLMSPRSGGLQTPECLSREGSPIPHDPEFGSKLASVPEYRYSQSAPGSPVSAQPVIMAVPPRPSSLVAKPVAYMPASIVTSQQPAGHAIHVVQQAPTVTMVRVVTTSANSANGYILTSQGAAGGSHDAAGAAVLDLGSERLEEKPTIAFATIPAAGGVIQTVASQMAPGVPGHTVTILQPATPVTLGQHHLPVRAVTQNGKHAVPTNSLAGNAYALTSPLQLLATQASSSAPVVVTRVCEVGPKEPAAAVAATATTTPATATTASASASSTGEPEVKRSRVEEPSGAVTTPAGVIAAAGPQGPGTGE

SEQ ID NO: 939 - DNA, 182979 bp, Mus musculus
  misc_feature (1)...(182979): n = A, C, G or T/U
tagaactcctcaattgattcaaatcattttaggaagaaagtttaaggagatggctttagttgttttgtcagaaagatgtaataaagttatgatcaaggatagactgtgccatctcttcaaagaatagtaagtaaaggttgcacaaggaagggaatacaaagagctttcataaattacactaagaagagaaataggcttggaaacagatttgtgatcaaggaaaagtattctaggtcaggtccaagagggatgccacaggtgcgcactatgataaagcaaggccatgtgaaactgttgctttgaacttataatgcgcttatagaatgaaacactgctttgaacttactatggacatccttctataactctcttttgtgtgatattttatctttgaggcaattttataaagaacttttgtctaagaaagtataaaaaggctgagagaaaaaaataaagtgtgactgttggggctctgctccatccaccaaatgtatatatgtgtacatatctatatacattatacacatacatacatacataaatatgtaggaatatgtgtatgtatataagtttgcatgtgcatttgtaaaattgatgaaatggatggttgttgggccctgccaagtgtgtaggtgtgtctctgtgtgtgtgtgtgtgtgtgtgtgtgtgtgtgtgtgtgtatgactttatcttctttctttctctctgcctcacaaagagttaatgagctccaagcctcttgcctatggccagccagaggcccctgagttaaagagtaaagaacccaggtaactttcttttcttaaccccctgctgctgtcagcaggagtcatttgccaacagcttttgactcccagaacagtaagagagttaatggccagaggtcatcagtctctggtttgcctactctgctcctgcctcagtacctgggtgtcagggcgggaccctgacagaacgaggccccaggaaaactctttcagttctgaagacataatcagtaacttctttctcagaatttctctaagaggaaggaatgggaagatgattataatagagattgatcaaatctccttgggatctacgttagcggatggtattactactttcaagtctgtaaatagtcacgactttactgtgaacttcatttgaaaacgaagaagggccaagaggtagttcagcattaaggaggactttgctctcttcagaggaccccgtgttgactgccagcacccacacggctgctcacaaacatctgtgactagagttgcagaacatccaatgccctcttctggcctttggggtgccaggcaggcaagtagtgcccagatatgtaggcaagcatgcatgcaaaacactcatgcatataaaataaaatagtactttttttttttaaatgaagaagcaaagtttaaaacttgacactagatgcttaagaaacagctgctagctgggataggcggtgttccaatctagttctttgtattaaaagtgtagatatttctagggtgatacaagttgctgatgtcatgctcctgttcatagttttcacaatgatcaccctggcagatttatgactttatgttgataatcatggaacagcaattaggaaaatttacacgatatcaagttaaacagaattcatgtgtgcttatcctaaaattacatctatgtgaaaaaatattatatctccactgtctaatggaagagatttttgtaagtgacatttataggcatttttattctacgtgactcattgttttttggttttattattttttgctgttattttgctgtgcatatttttttttttcagcaagaaaaaatatatgtagtggtactgggaattgaactacagtgttctgcatggcagtcaagtaacttatcactaatcatcactcccaggccctttttactttaattttggggcagtgctttgtaaacttcccaggttggcctagaacttgtgtccttactgccttagcctcccaagtatctgaggttatgggagagcctgacactcacaccaggtgaggtgtgcaccagttcctgcatgtgagtactcgtgcgcatgaggcatcagtgaaaccgtactttcagaatcagttcagaaaactccacttactttttgaagaaagggactccaggtgttgatatgcttattttttttaaagaattatttgttttatgtatgtgagtacactgtagctgtcttcagacacaccagaagagggcatcagattccattacagatggttgtgagccatcatgtggttgctgggatttgaactcaggaccttcgcaagagcagtcggtgctcttaaccgctaagccatctctccctgttgatatgctttataccagtggttctcaaccttccaacgctgcgagctgttaatgcggttcctcatgttgtggtgacccccaaccataacattatcttgttgctactccaaaactgtaattttgctacttttatgaatcataatgtacatatctgatatgcagactatctgatatgcaacccccaaaggggttgaaacataggttgagaaccattgttctaggctaagtacccacagcatcttcacaggcacatctatttgcagttccaaaaaactcagttcattgttttaggcttctaggagaacaagggcatcatagtttcttcctctgaagagctaatttcatctgagtgtggcatccaggttctgggggtcagcaggggactcatgtgcaagttacaggaaccaaggaccaaagcactttctttagatggaaccccatgtctcaagaatactatggagaaatgaaaagacctctgaaaaagtgccagccacttcacggaaaagtagaaggtaaaacttctataggtttctagttttcatctctgtaaacagagacaggtcgatggggtggcaggatggacatagacaaaggaagctacctcttcatcttcttatatcataatggagttgatggggctctaagaaactgggacatatcttgcgcgcgctctactggccaggaagaacgaccctgcaacaggatccttctgcacacgtttattgggagagcttgattgtagaggcgaaaagaccccgagcccagaactggtgctgcttttataggcctaggagaggcatgtcttacacccagattggttatgcactatgcctcatttgcatgttcctcatctgattggctactctctctcagtacctcacagaacctcattatcatacctcatttgcatgtctcacatctgattggttactctcggtaccttacagaacctcattatcatacctcatttgcatgtctcacatctgattggttatactctcagtaccttacagaacctcattatcatgcccgggccaggcagtgtctttgcaaaaactttactgcatatgtacacattggttatttgtccaaacttatgcgtggtggccagcagtagtcagtgccactctgcaacggcacatgtggcttcccacagacatatatgaaaggaaaagggtaaaataaaagtcacaaaacctgtaaccttggcaactgggcggtcttcaaggaaccagcatctttttactttcagctggctgggagagtctttctaggactgggccctgagcagtcatggcctcgaggcccgacatgggcagcccctgctaaaggtcacttctctgctattccttttattcttgtgataaatatttgaaggctcccctaccactagctgctgaagcaggcacaggaagatgaatgatacgccatcctcaaggagacagaaattgatcagaaaatggtgaatacaatcttgaactgtggccggtgctgtcaaaataaataagcacactccaaagaaaacaaacctcccagtctccactagagcaatgacaggctgtgtgggaggacttccctgaagaagggatgacagaaggagggctaaagaatgaatcaccattcacaaaggaagagaaggaacggcacatgctgggtatagagagggaacacatgtgccaggacctgtgtcaggaaataacagaatgcagaggcaggccagtgtagagaatggaagggatgcgggggtgggggtggggacaggtgaaggggggaaggtgcctggccatgcagcatactaagaatcactcacagaatgtgtgtcttcatcctgagagcaataggaaaaccatgggagagttctatgattggagggtttgcaagtacctctcccccacatttaaacatttgctttagagtagagaatggcttataggagtgtcttgatttcttttctgttgctgtgataagatgccatgactaaggcaatatggaacgagtttatttggggcttccagttttagagcgggagactctgactaacattgtggaaagtgtgacaagaggcaggcatggagctggaacagcagtcgagagcttacatcttgatctgcaagcagtgggggagggggggagagaagatgaaggaaggaaggaaggaaggaaggaaggaaggaaggaaggaaggaaggaagcaagcaagcaagcaagcaagcaagcaagcaagctgggcctgggaattaactcaggggataaaagttcttgctgctcaaacctgacaacctgggtttcagcctccaaatatacatgaaaagccaaatacaatgtcttatattaataatgccagtactcctataacaagatgggagacagagacagtgtaatagaccagctcaagaacaagccaagctggactacatagcacaaagagtggccctgcttcaacagggtggaaggtgagaagcaactcttgaaagttgtcttctaacttgcacatgcacacatgaaacacgctcatcagcactcagtcacgtacaggtctctctgcctctgtctctctcactctatctctctgtgcatgcacctgtgtgtgtgtgtgtgtgtgtgtgtgtgtgaaacgagagatgctatggcttggttcattcaacttgaagtgctaagattggacccaggaccttgcatatctaggcaagtaccttccaacagttttagcccccaccaactcactcagtttctgatccattccctctcatgtgtacagacagcacagaggtcggaaaggtaagagttgcatttccaggcctctcttgcagctagatttgcaggtgtgatttgaaacatatatatcagaggcattcctgtagaacatgagcctagcaatgatataataaggggaacagcaggatttgaagcgcacattctgctggtgtggcttgtaacagaaggaacgttctggcatttttgccagaactttctgatttgacagacagactcctgatagtgacaggagcggtagcagtcttggcagctcaggttggtagtgcctggcaaatgaatgcttactataattcatgcgggctgtccttagtatttacagtagataacatgatcacatgcatgtgttcccacagttggtacttagagataatttgatagttcagtcctgaagggaatcctgtccctctatgtccctctcttcctctaatgttcatttttatatttgttcatataatgatataaacaagtataacatgctttaaaaactggttttgccaaacacttgagagaaaactgaaagctctcttgttttaaaggtgagcaatctggaacattccagaaatgttagacatctgatttaaaagatgactcatttagaattaaattaaactttgacctcaagtttcacagatgatacctctgtgatacattaaacaggacttagatctaaaccaagaactctaacaatgtggcagtttcctttacaagagctttactgtaataaacacagattttaaaatcaaaagttaaaaatgtcaaccaagccattctggaagttactccctgcttctacttctcaaaataattcatctttgtttccctgaacacactttcggtgcctgtcttaggacagcttccagtctcttgtacctgagttcttgaagcttgtactgtagctatttatatacaggcttgatctgacctatggaggagtctgtaaaaacactgaaggcagaaacaccctctgatccacttttgtatgtcataaagtgactgctaagaatggtcctttatacaaaggtggtgcatgatttatatttagtcaaggaatagatgaattcttgtacaatctttgtcacgcgctcactaatactcttgaatgacagcttctaaggtgattctatgcaacaaaaaccactttaatatattttccagataaaagtgaagggggaagatgagtaggacatactttctcctcctcctcctcctccacctcctcctcttttagagtcaagttctccctctgtagaatgcatggctggctgacctggactcactatgtagacaccgctggcttcacattcagccttgggatgtcatggttcttcagtcctggatgctccttcagcaccctctttcatgatcacactgttctatcagtaatagcttcctagaatacggggttaagaattttgagccctaattgaacttgctgataaaaccagccttggcttcctcctgtggtctgccatgagtcagggaagggagtagcaggaaacaaagcatgcaggccaatgctcactccccacaggaagacagtgagcctatgtaggaccgtggtggctgcctacaggaagacagtgaggccaatgccttttctccataggaagacagtgggggcagaagcttcgtcctgtggtgccttgataccaaggcactgcacgaactgctcttacacaatcatatttaattcttagacagcctcaagcaacggtattatttgggttgccattatgcaaatgggtttagggaagcaaaatttaccctaggttcatgaccagaatcctagccctaagcacgaacttcttctgtctcctgatctgtggcattggctatgtgctgggccagtagtttttggtcaggaatgctccaggggtcgtttggaggcttcatagttgctacaacctggtaggacattgttctttgtgtctggtgggtagagtgcagcttccaggcactggccttccccacatgcacacaaagaattattgggccaaaagtgtcaatcacagaggtcagtgggactctgtcttagtctacatggcaattgtttccagattataaaactcttcatgtagcccaataagtatagtgattattttcatctcacaaagtaggaaaggtgattgcttaactaggaggtatcatggcaagacaagaagccaggggctctcgttctaggagcctatggagttcttgcctatactccattatgaccagcttcctttactgtgaaaacatgcaacttcaggcagcacttgcctctactaggaacttcagaggctaaaaagcttcagccagaccagggagatgtctcatggggtgaagacagttgccactaagcacgagtttgatccccaggccccacatggtggaaggagagaaccaagtcctgcaagttgttctctggccttcacatttatgcagtgctgcgtgtacacacacacacatacacacactgacatttgataaaaggaaagaaagaaagaaagaaagaaagaaagaaagaaagggaggaaggaaggaaggaaggaagaaagaagaaagaaagaaagaaagaaagaaagaaagaaagaaagaaagaaagaaattaagccaacgtagaaaaaccctacaaggtggtggagtctctagaaagatcaacagcatttgttcagctcttcagagaagaagactctcgaaacttactatatgcaaccattgatctttctctagtacattcagatcgttgtgctaaaataggactgtggggaaagctaattttaggacagtaacgagcttttgcaagataattaactctgcgtgggtttcaactttaatctttcccctcttgatttgtaggagtggagcgcctggaagtttatttagaagaggaagtgaaactgaaaagactggctgagattcctctttcttggaggcaaagcactttgaatatgaacaaatctctcatcctgactcattaactgccttcagtaccaacagggaacacacagtcagcttggaagaaacttaagaaaaatccaaggacaggatgccagcttaaacaataaaaccatagctttctgtccagccttggctactaggccatttggtacaggctaccacctcgttgtgttccaggtaactatgaattaggctcagcacaatatgtgtatgtatatagttatgtgattgtgtaatctggcgtgtgaactttggagaccataaacaccatttacaaagtccaaaggttggatttgcctgtagcaaaaacatttctgtgggataaaaggcatgtattcggtagaaaagctggcctggatgcaacaagatgatttggagtagggaggggaaaaaaagtgagtgtgactcaggcacctgagctgggcgtgggcaaggtgcctcaggcctgctcctcggtgctccttccggtttggtgtagtttaggaagccctgcatcatttatatagggattgccgagtgctagggctcacagcatcaagaaaatctgctttcttcgtcaaacttccccggccacctggcagagccaaagacagttccagagagtgtatccgtggaaggttccagaaagtgaatatccaaacctagtgaatgaaacatggtttatacagatgtgagaaagagcctcagagacgttcatacagggtcagcctgacaacggtcagccgctggtggaggcatgtacttggcattctggaacatctagagtgtcagcagctgagccaaaggagccaacatgcccagttcggtgaggcaggccagatggatcttaaaggggttaaatacatctgcagttcctagtgcccagaaagcgtttcctgagcctgagagctgctgagtccttcctgctatgggagcctatttgagaacctcctcccagaggacttcaggggcctgagcttcttccatcaccccttcggaggctctctgcatggcgctctctgtgctaacagttcaccaatgttttcctgattattcacatatatatatatatatatatactctctttggtttatcgtctgcgtcctctctaaaatgtaggttctgagagggcagaaacccggtgtgcctttaccgcaggtgcaggatcacatctgttcctggcattcatcattccctgcccaccgggccacctgcggcgctggactcatgtgcggtttgcaaattgacctcaaattatcagtggctgacatccaagctaggattctggcaagtgggcggtgaagtcggatgggcctggacatctagccagatgctcctgcgtttcgatcgcaaactacactgcatcttctttcctaacctatggacgggaactgtaacaacaacaacaacaacaacaacaacaacaacaacaacaacaacacctttctcccttcctgcctcctctgtaaccctataccaatctggacaactgcttctgggggccaggtccccaaagtccgaaccagtttctaatatcttgtgtctaacccttggctcaccacatatttcccccttatttattctcagctcttttcagtgttcaagtgattattgtccgttggactactttagtcccctggaatcttctccttaaaacagctcctttcgcgcgaacctcaacttcctcctaagtcattcactaaatatttattgaaagcctaaggggcacacactactctaaggatgctgggagccgctgccccgcccagccacacctaccatcactctccaccgctccacacgccctgaaccctggctggcgtcacggaatccgcctgcagcttccaagtccaacgcctcaccgccttcccccgatgactcctgattggtgggagtgggagccactctgctgccccccctccaccgcccttttcacgttattccgcccagtggagaactcaggctcctcctcttagctccctcccctcgctccagctcttcagctaattgcccggcagcgcgcgccctaaagttctaggcgaagtattgagaactggtcgcggggatcgcacaccggccagtagcaggggaccagggaccccggcaccaggagagctggtgcactgcgcgggctctcgcccaccatctgtctgcgagcagcgctcggcgccccagtctcctgcggctggtgctggaactgccgtcggctgagacttgcagggacccgagaagcccggtttgcgtccttctcggtctgaagcacgcactggggaatcgagaagcgtccccagcagcggaacacttaggtgagcaacagggcgtccgcccgcctggggttgagctgtggtggaggccccgagaaggctcggggacgcagccattctctatggttcagactgtgtctgtggtggtcccgggaagcccgggtccacggggcagccctgagactaggaggtcgtctgtcctgtaagcgccagttttctgggaggaagcactctggtgctgctcaccctggagctgtgcccctcgagttacagcctggcggggatggacccggagaaggagcggatctcaggagcctgcgtgcgggtgcatgaggatgccgcgtagaggagctgtcccggcacagcctggcgctgtgacgggctggaggcacaggaaacctgcttaattctgccaggaggaaggctttactacaccctcgagcttggggccctgcggtgcaggcacctcgctcttcggcctccccagtcaggtcacaccgctccacagtgtctgcactgggaccgagagcacccttcccttggggcttcaagcactcagcgggtgattggtgcctctggcgtctcccgtggcattgtcttgtgtccttcagacacttcttaaccagccgcgcgcctcccagactgttggagctgagagggacataaagttgtctctcaccttgtgtcagggaacggggctggggcattggagtcccctccgatgtcgcagtgccctaggaatctgattacttgatgagatcgtttgggtagtgtattttatttacactgtagctgcagaagatggtttcagagataggtaagcatagctctgactttgggtcatccacactcaacactctaagcatcatacaaggtgaggacctccttttggcctccagaaaccttcagacagattgcagtgcatccaggctaaatgtccattctgtccatcaactccacactgccctgtttgcagctcttcacagagcctaaagctgtctggaatcatctgcttgtttttccatctgccagccttcttccgctgctaggatgcgaagtcctgggaaagcagagaccaggtcctatttctcggtcggtccatcctcagtgtggagaaggcagctctccacactgcagcctcacactacacatttatggaatgagtaaatgttaacttcttcataatctgagactattgatttcatggctggtttggattttcatctttttccttttttatcggaaaaattaataaatggcagtaactcctgctgatgagcatgcactaaccatcaaggtatttgctgggagctctgtgtagatacatatagatgatccctaatattatagttgtctgattagctagatttttttaagtcccctattttagatgtgtgtttacaaccccgtgcttttttagacaggtgtgtggtggttagaggactttaggagttggtgtgttctccctctccctctccctctccctctccctagttccctccctccccactgtgggatccaggaagcaaactcaggtagaaaccaggtttgctaacaacccgtctccttgacccaagctacacactttaggcatttaaggctcttgcaggttacccagttgtcctaaggttattaagctgtactnnnnnnnnnnnnnnnnnnnnnnnnnnnnnnnnnnnnnnnnnnnnnnnnnnnnnnnnnnnnnnnnnnnnnnnnnnnnnnnnnnnnnnnnnnnnnnnnnnnnnnnnnnnnnnnnnnnnnnnnnnnnnnnnnnnnnnnnnnnnnnnnnnnnnnnnnnnnnnnnnnnnnnnnnnnnnnnnnnnnnnnnnnnnnnnnnnnnnnnnnnnnnnnnnnnnnnnnnnnnnnnnnnnnnnnnnnnnnnnnnnnnnnnnnnnnnnnnnnnnnnnnnnnnnnnnnnnnnnnnnnnnnnnnnnnnnnnnnnnnnnnnnnnnnnnnnnnnnnnnnnnnnaaaaatcaattaattaattacatcctaaatgttgcccctcccagcccccccccgccccccccccaagagttccttccccccagtgttgaattactaataagagacgaaaatatggtttccacttttgcaggcagtggatatgttgttcagctaaaagttcccgttttattcctgagatccattttcagtaatgactacccattgtaggccagataataccagactgcacaggacgaattatgtcataatcttcaccatcttgataggctctgtcaccggaggagactgcagcagggttcaggaatttgcctggggtcagtagcaattccccgaggtcttcattatctctctgactctaaacccttagcaccttccctcagactctgatgtctcttctcctgctgtttaatcagtgttaacccagtgatggagcccagtgctgatgctctctgagactaccctctttgtgagtggtccagggtctcactgccgttcgtttctgtggttgagtacatggtgtgtgggcctggtccatcagggacttttaatagggaggaaaggatatccccgttttcatctggatccagaaaggaatcaggctgctttttcccactgtggtaaatgagctcccactgtggaccatccccatccctttcacaaagtgctggaaagatgagtggttcctcgcagatgcagaagccactcgccccagaaggttctgaagtgacttttcagtaacataaacacatttagctctttccacccttgcatgaaactgagggtgtggggagatttgggaagagataggattggtatgattgcctcctaaagggctagtggcaaagagggaggaggagggccacagacattcctcttcctctagcttccagacagttttgggataatacagttctccctgcgagagggtctgagtaacccatcatttgttttataatgtacttcttgcagggctaccttttcttaactgacacttccatttcaagagctccagcaagggctggatttgaatgccctggaagtgaggggggtgtgagagagacattagggactggtgggagctgttaagctgaaagcgcttgccatgcataattgagagccatacagtttcctgctaactccagttctgcctaaatccacttattcattcactttctggccttctctagaaacttctcttttgccttctcagttacagctgttcagaccacattcctgcttccctccacccgcccttgtctcaggatctttcttggtcttttgtagcctccacagtgccttagttcagggatatcgctctaccctaacattgtctacaagtggttcccctttctttctcttgtctagcgtgtgtagtaaggcagactgtttaagaactgtcagtattgtattagtaaacactcttgggtggcttttagagttactaacaatattagttttagccggattctggacttagatgtggagagtcctgtcgtggatgttggccacccatgcatcacctctttctattttacgagccacatcagagccactgagttgtccctcagtgacaaggtgagtgtaggaaaggctcagttctgtttgctattagtaagtgttggagctgagagtaaaacccaattccctttcactacccagttagtgtagactccttagcccagctcgggatttgggatcggaggctcagccttggcttccgctctagcgttcctggcctgtgtgctggtaacctgaaccttgtcaccagaacgtctggtgtttgcccacgcgtgcctgttgccttctgtgctctcccactgccttactctctgtaagagctgtcttagtcagggtttccactgctgtgaacagataccatgaccaaggcatctcttttaaggacaacatttagttgggactggcttacgggttcagaggttcagtccattacggtcgtagcaggaagcatggcagtttctaggcaggcatggtgctggagaaggagctgagagttctacatctccattcaaaggaagacaccaggagcaggctgtcacccatgtggctaggaagagggtctcaaagcccacccccacagtgacacatttcctccaacaaggccacacctaccccaacaaggccacacctcctaatagtgccacttcctaggccaagcataagtcataccaccacaagaatgaaagtctttcaagctgagctcagacactgcttctgaaagcataatctctgtgaacccaaactctcagagcacttaaaagcaaagacaaaaacaagactaccgtgtattcctggctggcctggaactctctgtgtagatcagcatggcttcaaactccgtgttccacctgcctctgactgcgagtgctgggatcaaagcgtgcactgtgactggtcttgtcaaaacatttctttttttaaagtgggaatgaacacccagttctgaccgctgaagatgccgttggtttctttcttttcttcctctgtgcctttatgtctcctggttcttttatccccttgctttctggcccactctttatatttaaatgtgtcactcctttcttttatgtacattatgaagatgctgttgctgctgtgcaagtgtatgtatgtgtatgtgtgtgtatgtgtgtatatgtatgtgtatgtgtgtgtatgtatgtgtatgtatgtgtatgtgtgtatatgtatttgtatgtgtgtgtatgtgtatgtatgtgtatgtgtttgtatgtgtgtgtatgtgtgtatatgtatttgtatgtgtgtgtatgtgtatgtatgtgtatgtgtgtgtatgtatgtgtatgtatgtgtggagtatttgtgcatgctcatgcagatacacatgcgtgtacatatttgtctctcctagtgctgaatttggtgtaggttctggggaccttaactcatgtcttcaccccccatccctctctcctagattttaaatgtcttgaaggcaaggcaagtgggttgtttctgttcttgacctaaggatctggtgtccttttgatagaaaagactcaattaaaaaaattagacaattatatttggttacattgtgttaaaaaaaagcagttggaatgtgtcattttgttttctagttttgtgtttgtgtttgttttgttttttaaatacagggttatttgcttattgttatgtggctccaggctgaactttctcttctgcctcttcttgctaagtgctgggattgtgggcatgagccatcctgcccagccctgctttctagtgtttgatccataatactttaatgcatacctttgtaactgtatgctgaagcaacagagcatctagcgaaatccacgggaagcacttatcctgagcccttttaagccacagagggaatcgtaaactcttatatataacaaagctgtggaataaacaccatgtgtgtggtgtacactgttttctagtttgttgaggtttggcccgttgctatgtattgcaatgctaactactggccctggttgcttcagggaggagagaatccacatgtacatcaaataatgatatgtgatcttgcttcataatttaaaagtattggttaaataaagatcctgacagctgatagctgggctgaagagagttaggtgggtttgcttctctggcttggggtctgaggaggaccaggaggagagagagaagaaggtggagagaggagaagatgcgatggggtagatgaatcatgaaaacatagccatgagggccggtcaattggagttaagtgtggcccagatggaacatggcaagttttaatttgggcttatgactagggaaatagatactaatagcttagagggtagctatctgctcatctgtaatgcatttaagggtttttttttttttataaatataaaagttttgtgtcttttatctgggaactgaatgatccagggcgggggtagaaacccctgactgagattaaatatttattacaacatttcttatctgtgctaatgttactcttattatgagcctattacagggggtgtgaggtggcttgtctgactaagtgcttgccttgcaaccatgaggaccttagtttgattcccagaaacctggtgctgtggctgctgatcctagcactagggaggtggggacaattgaatctttgctggcaggccaagtgagaagccctgtcttgaaaggagagagcagtacccaaggaatgacatctcaggttatcttctgacatccatattcattcatgtatacactacacttggtctctcatacatactactctctctctctctctctctctctctatatatatatatatatatatatatatatatatatatatatatacataaacagacactttggaattcattctgtctatggatttttatttatcaattaatattttgaagtttagtacgatttccatggcctctctgaatcaggtccagcccctgtccaatcttatagctggatcaaggggcttggactgaattggtcactggagtttattgttgtggttttgtaaacagttttgtgttacattgtattacgtttgtatttgtcattttgtattacatctggataatgtagtataaacaccttgtgtatgtagcgtatttggccactactttttaaaaaaaacaacagcgttggagccataattcatatgtggtggtttgaatgaaaatggctctcatagattcattgggagtggcactatttggatgtgtgcccttatttgaagaagtgtgtcactgggagggtgggctttggagcttcagaagttcaagccaggcccagtgtctctttttcttcctgtctgcctgccaatccaaatgtagaattcttggctccttttccataatggactaaacctctgtactgttggccagctccattgaaatgttttcctttataagagctgctgtggtcatcgtgtctcttcacagccatagaaaccctgagacatcatgtgtcatacaaccgtaattcatgtatcatgtaattcatcctctgaagttatacaatgtaataactcctagtatcatgttgtgcgactgtcacaataattaattttaggacacgttattacccctatttgtgtctgtatgcaatcatttgttctgaaaaggcaggcatagactctgagactttttgtgtcagatttctttcatccaggattttgttttcaaggttcattcctaggatgataggagtcaatacttcattatttttatactattttaattattccatatttaagttagtcataatgcctttaaccccagtactcaggaggcagatgcaggcagatttctgtgagttccccaccatattgtatagaccatgttttattacccatttgccagttggaggagctggtggatttttgtaaactttcccaagttctggtcactcatgcccttgattgagtggcagtgcccttcacatcttgacgccacactgtgtgacaggagatagatccttaggaagcagcgattgataaagtattgtagtgaatctgtcatgttggggtcctcaaagcatcttggtttcctgtggtgctggggacctgtgtcaggacctgtgagatgctaagcttatacatactctgtcactgcgcttacaaatccagcttgattatttagacaccaactcagaaacaccaacagtttaaaaagagctgttaatcaaggagatgtgactgcggatgaaatactgtaacagtgtagagaagacaagatcagcgaatgcgtggtggccactgaagtggatgccgtgcgtctgggatgttctttgtgtctgcactgtctactgatcagccattggttatgtgtggctgctggacacttgaatttgactattctttaccaagatgtaatgtctgtgtaaaatattctttaccaagatgtaatgtctgtgtaaaatgcatactgaattctgaagaccgaatatgaaagaatgtaaaaatgtctcagaaacatttttattaattacatgttgaaggtttttttttttttttttttttggtttttcgagacagggtttttctgtgcagtcctggctgtcctagaactcatcttatagaccaggctggccttgaacatgaagagatctgcctgcctctgcctcccaagtgctgggattaaaggcgtgtgccactccccctgccactcccccccccccagcaatattccaggcatatgaaggcacagattcaacaataatctcattttcttttatctttcttacttgatgacttaagttaaaattatatatagggatcatattatagtctgttggacagtgctggtactcatgggtttttttttttttttttttttttgggggtttttttgattgtttgtttgattttgttttttcaagatgaggtttctttgtatagtcatggctgtcctggaactcatcttatagaccaggctggccttgaacacacagagatatgcctgcctctgcctctgcctctgcctcttaagagctgggactaacagtgtgtgccatcatgactggctgctactcatttttgtgtgtgtgtatgtttgaacatttcatattagtatgttttaaaacatctaaggacatctcacattttaaaaaacatacagtggaatatttttgtaaaaaatccttcatatttggaaagtttagggaatatgggttcacttcaaggtgctttggccttcaaatgtggccttccacacccatgtgaaaatttgaaaaaaattttttacagtgcttggattagcagcctgggaggccagaattgcttctttgtctgtttattggattcttttgaaattgatgaaatattttcttcattttagaagaatataggaaagtgaaggatgattttatagtttttgactatgttatttatactccagagttggtttttgtttttgtttttgtttttttctggagttgctttctaatggcctctattgagcatgcataaaatataatgctaaatgataatgtggagatttaaagccaagaagttggttgctttcctacaaaatttatttagatgaaaactcttatctctgtctagatgtctgtttactcagagaatgataggggagctaatacgttcaggtcttgggggaggtgtgggtcagatgaattcccctaaaggactcatccactttgtgggaatgggaaaatcagagcttcaagtccagtcgctgtggctcctaaggaagggtcaggagaggatcatagactcttaagtttctgtagttttttattttttaaatttttttaattttcactctttttggttaaagttctgaaattggttttagtgatgttgtgttggccaaaggctctccttaccagaacattttcccacttgtgtgttaaagcacagtgaagtaaagatttccaatcctgtgtcctgtgttgctgtcagatattctaatattcataagacacttaattaaagtttaagtcttctaaaactatgggaagccacatgtggcgttgcagagtggcactgactactgctgcccaccacgcataagtttggacaaacaaccaatgtgtacatatgcagtaaagttttttgcaaagacactgcctggcccgggcatgataatgagggtttgagagtataaccaatcagatgtgagacatgcaaatgaggtatgataatgaggctctgtgaggtacagagagagagagagagagagagagagtagccaatcagatgaggaacatgcaaatgaggcgtagtgcataaccaatccgggtgtgagacacgcctctcctaggcctttataagcagcaccagttctgggctcggggtcttttcgcctctgcaatcaagctctcccaataaacgtgtgcagaaggatcctgttgcagcgtcgttcttgctggtcgagtccggcatgcacaagataaaacaaacttctctctctgagttataaatattgggcaatgagctgcatgcttagaggcaaatactaaataatcaatgtgattttaatttcaccaatattgataaattctagtgaacacctcactagaatgaatgtgtgaagtaagatttcaggttcatttgttttgaaagcatttgtggatcccattccaagtctcaggcaccatgctggatggggaattagcagtagactctaccttcaggactttacaggctaaaagaggatgcagacattaaacagagaattcattagttaccatggtgatatgtggctcaaagggaaagagtctggattttaattgggaccctggggagcaaagttctattttcctgtgggtcacaattcaggctgcaaagatctgaatgaggaaaagaagagagactgactgggatcctcccaggagaaggagacgtgccaagtcctgtccttttgtacctttcaggttgtaggaggccacgtggacttggggagaagggtttgaatttctttgatgctacacacagatttgtttatttactaattgggattgagtccaaagttgagtttctgttacttctgtaactgaagctgaacaaggtctaacaaccagagttgactggtgtggctctcaaaggagcttaagttgctggctctctttcaagtgtagctcatttgtcagggaccaggatgagttaggggtatggatttgttttcttatggcggtgacaaaatgcctggccagaagcaagctaaagtaggagaggtttgtttggttggtgatttaagggatgcagcccatcacggtggggaaggcatggcggcaggagcatgctggtcctgttgtgtccacagtcaggaggcagagagagatggatgattgtgctcgcttgtggtctgctttttatttagtcctgtaccccagctggtgagatggtgttgcctacatttagggatggtcttttcctcctcagccaaacctctctggaaatgccctcatagacacagccagaggtgtgtctcctaggggactccaactccagtcaagttgacagtgaagatgaacatcgtaggtatttgagggtgtgacagcctgatgtggattttgttctcacagattcagatcagttttcagctagtttcttacgtgggtggacatcccacctttgcttcctgtggggcttgggagtctctagagaaggacccatgcagccattcagggtgctgatgaacacaaagaacagacaacaatggcagctggtgactgtgttaaactgcgtgtcacagaaaagcatttggggttagtagaggtcagaggctgggaacagagatatacggtggccacaattggagaagagtaaagaaatgttatcaactttttttttctttttcagatacagggtttctttgtgtggcttttggttgtcctggaactcactctggagaccaggctggcctcaaactcagagatccacttgcatctgcctccccagtgctgggattaaaagtgcctgccactactgccctgctatcaagatatttttaaaattagtatgatagttcctaggaccaggggttggtggcggcagttgagagaaaggcaaagatggttctatgggtgagatatgtaattggaatctgtgttctatcttccactaaaataagttccagatggagcaaaaacttaacatcaaaacagctagaaaaatgagaaccccactccaggagttgatggagacaggaaatccttcctagatacgatacaaacccagaaacttttatgcatataattttttgcaagaccaaatctttgtagttatttcaaaggacaacaaaagttttaggaaagagtaccatggtgtgctacacagatgtacttttatcagcatataaagacaaataatccataagagaaaggctaggtactctggaggtaaagaatatgagtgcacagttcagaaagctgtacagaagtgacctttttcttgaagttttattcaatgtatgtgagtacactgaagctgtcttcagacacaccagaagagggcatcgaatcccattacagatggttgtgagccaccatgtggttgctgggaattgaactcaggacctctggaagagcagtcagtgctcttaaccgctaagccatctctctagcccccagcagtgactcttaaaaatgttgaaactttaatcactttcacaaaaccttaataaggtgctagtttttacatgccagattggcaaacatcacggcaatggaagtactggcaaaggaatgaggaaatgtgggctcaaatactggatggaagtttaagctaatatagcacctataatttatcaaaattacaaatatagtcattgcctgaatcaacagttacaattctaggaatcttatcagacttacaaatgtgtaagctttatcatttaagatacaagtaacgtgtagaatacatagatgtatggtatgcattgactatcaacaaagggattatatattatctattgtgtaaaaatacatctctatatagtatatttcatacatctctatggatctatatggatgcctatatttgcacatgcgcacattcaccaagctggtggtccatggtcagcctccagggcatgggtgccttctcccaggtccttgctgatgacctgcgatgctgcatgaatcgttcctggtgggtgcaggcacaacatggaaatcaacaagcaggtctagtcaggatgctttcccagggagctacttggtaaacattcactttttctctttgtatatttacaaatataaaatatcttgaaggatacacaagaggttgctaatgctaaattcccccaggaaggggtagcaggaaacaggaagattaatgatgaagttggaattgtgttttttgaatttgctacaagtaaatgtgttacttatttttaagaaagaatccaaagtagtcagtcactgcagattttcatttccatgagtgtgttatttatgatgcggtgtttgtgtctgggagagcggagacagaagctcttaggggaaagggtgcttctggttgtgacgtgcctagccggcactgttgtcagcatggaatgttcagtagcaacttgggaaagaagcaaagcttgtgaccctatctgggtcagcagttcagtgggtattatgacagctgaggaggttcctaggaggtcccagtctcaggcaggtcccaggagggacagcaggatgcatgctgttctttggggacagtaagccaaaagtcaggtaggagaaggaaaaccagccacatgggtaggaccacacagcataatgatagtcatgggtcttacggagtaacgactaaaaaggaatagctgccctctgtatttactgacagaacatcaccacatttagctctgacaaccaacatttagatggaattatgtttccagtaaactccttgagctgaggagggtaattctaaacagggtcgatctgctggactacgtgctgatagaacggggcctcagagcagggtgggatttcagaaaatggggaagaaaggagagagaaagacatttcaggtgaagatagctgtgggccacagtggaaagcaagttatcttttgtagctggaaggtgggatttgataggaattccagggtatgcacggctgttcaattctcagccagctggagccccaacagatggtttgaacacgggattgtgtgttccccaataagactggcaaagggtagacagcacattcctggaggactgcttatagtggaaaagagagactaagaggcagaaaaatcacaataaaaggggagctagatgatgcagtggtccatgaaacaaagggtactgggatggcttttacacatctggtctcttggtgttgccttgtttgagactatgtagcctgggccggcctggaactcatggagaccaggctagccctagaatcactgagctccacctgcccttgccttctgagtgctgggggttaaaaatgtgtgctaccacactcagcccagtcacttggtgtttgatggaagctttattggcctgtgtggcagtatatttgtgtttttatctgagagtagtttatgaaagagatgctctatctctagaccattctacatgggaataagcaaagtttggtgaatggtgatttgttgacagatgtatgtgcattgattatacattgtatctggtaggtttcacagagactgctgcctctgtccttaggagaagggggttggtatgagcgagtctctcatcttacaagcatgcatatgcacgtagcacaaactgtgggctccttagggctctatactcagagtgatcttaactttgtacatgtattacttagggatcataccaataataaggagtcagagaggaaaaggtggtggcctaaacaggattaagaaaaaggactgcatgtatggacttcccgaaggtagtctgctcatggctggaaattcctgttcttctagtctttagtctcagggcctgaagagcattaggactggtttgttcctttgagctctgcatgccttagaccttggttaggacccagaagcctctttgcttctttggcatctgtccagctcctgtcacagtgcagatcagatgtaggtggacacttgtgtaagagagctagctgccttttctaatccacaggtggcacttttgctcataggatagtgtttggatttcctctgtgaaatgcgatgtggagttgcaacagacgctgagactctccttcactgccagagtgtcctaggctatccaagctctaggaggtgaggttctgggacttgcagtggctgtatagcctgcactgtggtttacaagtcatggccctgcctatgtcctcaagggtattgagcactgctcctccttagccaactgttgatacatgtgaaagagccataggaaacagcctggcgattgccagctgggcaaaagacccagctagaggagaggatcatgtgactaggaaacagagataagtttctctggtatactgcttctaagccccagcaacattgtaaccagtttcaaagattcattgtgtggatctgttgtgtaacagcttccttgtggttgagacattccatcctgctgggaagctcctgaaacagaaaggtaaacaactcaaactagtttcaggaagtccctgaaactgaccagattcaccatgcccctctctaccagagtaagcaattgaagttgagagtcccgcccagaggaagtgacgctgatctacaaagaagattttcagaggagaaaagctacaaagactttgagagcagaccagctgcctcgaagaagggaaggggagatcagaccgactgcctagaagaaacagaagccaggctgcctctaagagtcacttagacactttgcaatctgactgtgcaataagttccaggttcgcagctatgtgagctgtcacccatgctgggctgggccttggtgatgcagctgtctttgagtcatttctgctcctgtaagtaacctctcactcatatttctttaagtagccccaataaaattcattggttcaccaagtagggcaggaaccatagttggtgtctggacagggacctgagagaaccagagatgagttagggaagagcaagtgcatggtcctggataagaatagcaaggcctgaagttgtgacgcctgagatggagcttctctggaggaaattccaatacagttgtcatttcctggatggtgggcgttcttgtgcctttgcgctataagagtggttgtattgttcttgcagtaggtagtgagacatacaagtaaggccgagccatcaggattaggagtgtctgtaggaggcagtctcagaatagcagccttcatctgtgtggtatgggtggcatgccagctagatgactggagttccctgtgtgaatgtggagacaccctgaaaacagttaaaaaaaggtagagggaacgttacggtctttgaggttagtgcagccgaggaggctgcctggccagtgttgtgctcagttagaaatgtacttgaggccaagatggcggccaggcaggggcttgttgtgtaaaggcgttgttgcaacaagaaagagagatgtagccagtattctctgttagctcctgatttagcaactaaattagataaacaggaaggagagatggtaaaggctgtaaaagataagtccaacctttagtagaaaaagagaggaaaaatctgtaatctagcacgtagacggggcattaatgttgtatcaggaaattgttagcacttgaattgctagcattagggaaggcttttcagcaagtagtgagagagcctgacctttgaggctgagggacacaggcgctggtgggagcagtctaactgctgtggaggcagaaaaactaaataatggaactccccatcctctccttaattaaggcaaaggctgtataacccgagatagtatgaaaaagagcaatccctgatggaccggtttatcaaagccattaagagcatttggaagaccccataaatatcgggagctggaggaccattgaggagggtcaggtgttggctgtatttgaaccctagctcactgggccagacagaactctgtttacagaggagttaaacaaaggttgatccagaagggatcaacctcaaggctagtatcaagctttaatggctgagtcctttggtggaacaagatctttataaagcaggaaaggctttggcagatgtcagtgacttagaacagcatgtgaggaacgtcttcaaagtaaaagagccacccagaggagatcattaaaaggtaaagtatgtggcaggatttatgttgaactagggttgctaaggaaaatctgatagaaaggcattgtgtgctaaggagcatctgcctaaggagaagacatccttgacagaatacagatgaagcacagcaagcctgtcccaggagtgggtgatcccccagaccaaggaggggacacagcaaaagataaagctggggtgtagactgttcgcccagctagaactgccccgacaaccagggatggtgaatgggaggctagaggcatgtgccaacccagggtcactctgacctagtgagccagaggtgcagcgggaaagcagggccatatttacctttggccttgagtatatctgagcagactaagtcaaatccactgagttgatcaggtgtggagaaatgcagggaggctctcagaacaggctccaggtcatataaaaataatagttcagagagaatcgccaaggattacagagaacaaattaagttagcacctcctatctatgtgtattagtcagggttctctagagtcgtagaacttatggaatgtctctctgtattgagggaatcttattgtgatgacttacagtctgtagtccaactaacccaacaatggtcagctgtgaatgggaagtccaggaatctagtagttgctcagtcccacaaggctagttccttcagctggtcttctgtagaagtaggttccaacagatgtgctggcaagtaagtgcaagcagtagaagaatgaatcttccttcttccaaagttgttatgtaggcctccagcagaaggtgtggcccagattaaaggtgtgaaccacccaccacgccttgatctggaacttgcatggtcccaggctgaccttgaactcagagatctccttgccttagtctcctgatgttaaaggtgtgtactaccttgcctgggcttaagcttttcatggccactaccactcaagatctccatatcaagatccaggtcaggaacttgtgtcttcagcctcaagatctggatcacaggtgagccctcccaactctgtactgtagttcattccagatatagtcaaattgacaaccaggagtagccattacactatgctttgtacctgaccttgatctttggaggaagcaaatgatacaaatggatggaacctgtccctgctgtattagaccttactcctttcaactcctggttggatgccagaccctattgctgaagacactgcacatccgtgctttgacttagaacatggagaaattaagctgggtctggactggaaacttgtgtcctgctgactggtattcatagtgccagaggggttcgtgccagctgcaggtgaactgtcaacaacattcctgcttgggtatgaactttgtgtactaaaaataccaacacacaagattgcatgtgcctgcttgtgcaatagtggcttggctgttgtgggtcagaccaacatccttctgattggatctaaggccagctgcacaaaaccagattcaagcctagtactgggagccagaacaaaacctatggctgggaaggtcaaaggttcctctggggaggcaacttctgcttttttgttttttgtttttttttagatagatgtgatgtgcctgtcaaattgccttctaaacttgtgtttacgcccattatcagcctctctcataaccattggagagctcctgagatcaaatggctgttactatgatgtggtggcctgcttcttagtcataggtggatggatgtctatagtcatcccctccaaggctcagggatcattgaagaagatgggacagaaagaatgtgagagctggaggaaggcgccgagtcttgtgtagcagtttcctcccagattgaaatatttcatcctgcagggctgctgcttgtctcttttgctttctggctactacaaggtgaacaagcttcctgtgccacacacgtccactatcacgctatgttgtgctgccactggcttgaaggcacatgtgccaagtgactgtggaaactcctctgccttctcagtggcttttctcatttctcctccttcacattaatggaaagctgacaaacagcagtgtgctggctacttttatgtcaacctgacacaggctagaaacattccagaacaaataatttcatttgaggaggaaatggcccccaccagattggtctgtgggcaagtctgtggggagcattttcctgattagtgattgatttgcgtggtcccagaccattgagcaaacagcgcccctggactaatggttctgggtctataagaaagcaggctgagcaagccatggagcaagccagtaagcagcacccctccatggcttctgtgtcagttcctgcctccttccaggtttctgctttgagttttttccctgacttccttggataatagactgtgatcctgagctgtttgctgaattaagccctggttttgctgatagtgttctgtcatgccaataaaacacactgctactcagaacaataagataaccctgagacaggatgtgaactaactgtattgaaggggtgtgaggaaaatggccttgagaatagatgaacgactccccctgggggtgagtgattgtgccaggctgagctgtgcactcacagcccttcagcctcataagacgtagaactcaaactttttccataagcatggagacaatacacatgtttgtgtgccttaatcacactctgccaacacatgcagacaaaaattgcttctaactttagaagggttaggagcgataaaaagttgtggagagagcacagaaagcccttgtctgccccaaccaagttttccttagtagtaacatcttaatgttatgatccatttatcaaaccatcgagctggtgctggcatagtaattcggaatgtcctttggctggcctagagtcccaaccagcttttcctattatgctaaattatgcatctcccaggctccttttggctgagacagtttctcagatgtctttgtgtgtgttgtgatgctctaactgaaaaccttaggttaattaattaattattaattaaaaattttattttgtctgtatgggtatttgtctgcatatatgtctttgtaccatgtgtgtgatggatgccttcaaaggtcaggaagagggcattgaaccccatggagggtgttaagtctccatgtgggtattgggaattgagcctggatcctctggaagaccagccagtgcttagatatgattctagaccaagagtggttcagttacaaaagtgcttgctgtttaaacacgaggacctgtatttggaccccagatactcctgtaaaaattgtatggagcgatttgtgcctgtattcccggagcttctgagaaccagtttccagggtttcactggccctccacagcccagcagaatccatgagctccatgctcagtgacatacgctatctcaaaagtaacatggagaataattgaggaaggcatctgctattgacccctgacctcggcaaaagagcaggcaaatgtgtgtgtggagcacacagagatcaacttatttataaagaggagaagtgtagccttgtacaatttgggaggatgggatacccaggatccaggtgctgacatccggtgtggctttttaccacatccggtgtggcttctaaccacaccctcacacagtggtagattccagagaatctactcttggaaatcctttaaagatccatttggaaggggctgtttttatgatggaaccactcccaaagcccaacttccaagcgttgagaggggcgtggcggtgtgttttatagagtggcggctactgggatttggtgatgctttcgagtctgaggaggaagtggctttccatgatgccctgaggagggtatgtgatgccatgacctgagcttgtgttcctcttgcatcctgaagaagtggagtcctgttttacctcctaaagggtagaggatctagctaagagtcatgactgtgtggaagatttctctctccctttttcctatttatttatttatctatcattcattcattccactacttaatacttacttactatacatccctgtgaacacacaggtgtttattttctacttgaggttctagtctgggagtacagggtgggtgtactgtctctcgggtgttgtcccgatttcagccatgaggaacctcatcagctggctcccactgcctttgacataagtccatcatgtgacctcatcatgtgatcttccttactggttattttctggtactacaaggtgctccaggctcaccttgtgcactcagtgtcatctggctgtaaagttactcctggttcatcaagtctgctttaccacccaccacctggatcatgacccaccgtgacaatcactgatctgtttgcccccatcccatgttaaagagaaaagtagacctctcaaagaagaggcagtttaactaagaccattctcatgtagctaggactttatctttgacccttcctagaactgcgtatgagccgatgtccccactgaggaccaggttcagcctagcaccatctctcccaggttgttgtgtgagatattcagatgtgaattcccctgcatgtgcccagggcagggttggcagagaaagagctgctggtgcgttctctgtggaggcagctgagatagatgtgtgctgtctggcctgaacaggattttataatgtgaacacattgcaaacagactctgactactgatactgaagcacttggagcaggcttgcctacatgactggcctggcttccctgggcaggtgggccaaagaaatgctttggattctagcgtattcttttgagcccatctcctttccaccaaagagggtgacttcaggagagatgtaaatgcgcgcagcaaacccttctgacttcatccagcgaacctcagagagccaccagcgctgaattgaacaggtgcacattcagtgttctcaggcctgaagcagcttggtgttaggatcaggcataaataaccattataccagggacactttcctgttttaaatttaaattaaatttcatgtgtatgtgtgttttgcctttaagtgcctggcagaggcaaatcccttggaccttggatcacagatggttgtgtgctaccaagtgggtgctaggaattgaaccctgatcctctgggagagcagtccctgttcttaaccatctctccagcccccgacattttttttttttttttagtgaggaaataatatagccacccggaagctcctcagattcagaggctaacacagggcaggcccatttgaatattgattttcttcatttcagaagactctatttattttatttatatttttattttatttatatttataatcaggtgtgggctatctggctgaaaaaaactaatcctttaaaagttttgaaaggaacgaggaagcaataatgtctgaggccatttgtttgcaaatgacagacgtccatttagtgtcagaacaataaaaaaagcgtttggtttatgttgctaagaaattctcagttgcagcactcaggaagcagaggcaggcagatctctgagtctacagagtgagttccaggaaggccagggctgtacagagaaaccatgcagagtaagactggcttcagagcccgagctctgctgccacagactgtctgttttcatctgggtttgtctcaggcaggctttcccctcttaagtgcctcttagcacacgggagcaacggttgcatctgtcgatgtttatggtctgttgatttgttacctgggtcatgggtctaatccaaattgttgggagcaggattatcagggaggttacttgccaggcaagggtcatgtgtgtcctatagaactaaggaaagactgagacggaagtatcagagtggagtgtttgcaggtcatttgtggttgtgacggatacttgctattgacagaaggaatgtaacttcaagtctttccttccataacgtgtttagtgtagatcattaggtaggttaggaacttacaggaaccaagaattctcagttcaggatttcataaaactgtacagtttggcaatttaaatattttggttttccttgttgtttcttctttctgcaaatgtcactgcctcttagtgacagagacaaggtgataccaaggaatgtaactaaagctatagctgcatcttcttctggggtgacacccacttggggacacatccacacaaagccagtttggtccgttgatcaatgggagttggaaggaggagtccaaggcttgccatcttctagtacagtaggaagtggagggctacctcctcctggcggttgccaggatgctcgagttttgttcatgtctcccctcctgagtcctgtgggaatccaattcagaaagaattaacacctagttagaagtgataagcctttgggtctgttcatggcctcagcacgcccatcatttctatatttcctttctaagtatgagcaatcttaaaaaaaaatctgccctcactaccattgtattgattttgtgttgtccaattctctgcttattttaagccctgctggcctggttcatagcatcatgtcttcttgttttgtttttgtttttttgttttttccttttttaatcttcaaaataattgtgtctgggctgtggtcaagattcacaaaaccccctttgattaaatttctcattcatttatgcggctcccatgcctttatattttgagactatttttagaaccctaatgaggcggaaggatttgtgtttcattccccttagcttccctctgttcagacacctgcgcttgccaataattatcactgcctcgagcacattctttctttctctgttgcatggcgctttaaaataatattggggaaagctaggtatggaggcatatatctgcactggaaaaaatagtgttgttttttcttggtagtttaacaaaagatgtttctaaagagtaaaagctagtttagtaacattttaaggctgatattttcttctcatctttttctaccaccattacttagtagcccatctcctttggtcattttgtttctttgtttcttttgtttcttctttctttttcttttttctttttggtatttcaagacagggtttcctgtgttgtcttggctttcctggaatttttgctgtagtccaaccagactggcctccaactcacagagatctaccagcctcgaactcacagcagatctatcagcctctgcctcccaagtgctgggattaaaggtatgtgtcacaactgcctggctggtcatcttgtttcttaataaaaaaaatttgaatgccatttgttattcttgctgtttttcaaaagttaaaaaaaatcactttgtgtgacatctcttcacaatggtcgtctcttggtcaaagtagtataagtcaattcatttttgcaggtgggtgacagtcaccacagcattttaaaaacatttattcatgaaagtcatttcaaagagaacatattctctttgctagagagttagcctatttcctgttatttaggtaaaattttcattgactggaacatccatgcagaaaagtatgaaaaacttgctatctggctcgttgagctttcacaagctggatgcatctctgtgaccgctttccagattgagaagcagaacgtgactaacatgtcagaagctccactctcaggtcagccttgcttggtcttgcaccagggatgatgtaaactggatgcgctgtgggctcactctgtgcctcggtatgtctctctctctgtgtgttttggtgtgtgtctctgtgtgtgtttcggtatgccattgccatttgttcagtcttcatgctgttagaattctgttgtctgctgatatgacagtgtgcccattcttcgactgacaagtgtagggtttccccctggggtgccattgctgattcgtgtggctgtgagtattcctggaccttgctttggtgactacacaagtacatacctagtcatagagttgttagccacaggttcgagtatgttcctctaaacagggtcgactggtggctgcgctggcatacatatcctccagtagcacagagtgtttctgtggctcagtgaagggtgtttcctaacgcctgtcctggtgatctttttgtagaattactgcgccttactacagtggtttaagagatattttgatctcagttacaccttttagtcatttaagtcccagccaacgtgaggacaacagactcaggtaagatttgtcaggaccatgggtccctagagctccatctgacttttctcatcactatatttgtagtgttgtttgggacacttgagaacacatattcatgagggatggagagatggctcagtggttcagggcatttattgttcttccagaggatctgagatctgtacccagcacccatgtcacatggttcacaaatgcctgttaactccagctccagggatctgacacccccttggctctctcatccacccacaaacatgtgtacacatgtggcatgtatatatgcacacacacacaccacacatgtggcatatatacacaataaaacaaatatttaaaaaaagaatatgtatacagttatgaactcattctttccaccagtctgccatctcacactggagtgaggatactggacacagtggagggtgttttaggaaacagccttgatctccagggagcttagacgaggatactggtgatgctgtcatggagctctggagactagccctggggtccagagggaggggaggagacaacagtgttgcataaccacgtgacatgcctgcccacctgattccgaggcacttttgtaaatggaagggggagggaaggcactttcccagaagtctcatccactcagtgtggctactgtgtgtagggggacctagaggaagaaggtggcagagtatggtatgaattcccttgaaaagacatgtctatttgatttgctattgttgtatgtgtggtgtgtttgtgtgttgtatgtgtggtgtatgtgtggagtctgttctcttcccgcctttatgtgacgtacctgtgatggatgacctcagaccatgaggcttgtgtggcgagtgcgttacttgctgaggcatctcaccagactattttttctcatgtatacatatgtgtggtattgtgtgttcgtgtgtgtgtgtgtgtgtgtgtgtgttcgtgtgtgtgtgtgtgtgggttgtcttcctcgatcaccctcaccttatacagtgaacccagagctcactggcgtgtctattctaactgaccaatgtgccatgctgctctcctggctttacctctggggttgcaaacgggcctccatgcctgcctgggacctgtgacagtgcgtaggatttgaactcagatcctcacacttgctttcctcacacttgcttggcaagcgctttactgagccatcttaatatccctgagaaactaattagatttttttttattttttgacattatcacataattacatcatttctcccctctctttcctctctccaaatcgtcccctatactctttcttactccttttcaaactctcattctcctttttcattagttgttgtcggtctatataattaaaacactagaaaattttttttaaaaaaatcttataagaagaagcagttaagatacagagatacaactttctgctctcccgttggcggagagttggccttcattccattacggataaatgtatggagccgtaacctgcatagggctggcagtgagtggctcgcgtgcttcaagcctctctggagggtaatctggaaatatttttctaagttgaagatgcgcatcctttccacgcagctggtctgcttgggcaaatgcacctcccacctgagcgtaacctctgccaaggctgtgatcgtagagactgcacttagctgggtgtgagagggcggtaaggaaacagtgctctgttgctttaatggcttcccatagagctcataatggcttgagacagtttcctgtctcatgcatatctctgtggttcagtcctaaagatgtggataacagcactttgtgtggtacatttgtttagaaattaggggaaatgtatgcacttttttatccacaggaatatagagatgaattgggtggtggtggcgcacgcctttaatcccagcacttgggaggtggaggcaggtggacttctgagttcaaggccagcctggtctacaaagtgagttccaggacagccagggctatacagagaaaccctgtctagaaaaacaaagccaaaaacaaacaaacaaacaaaatagagatggcatagcttatcttaatttcttcctaagaggagagctgtggctggaggaccagagtgtccagttttaaaccatataactgaatcatacccttccttgcaaagaaggaatgagattgcagttgcctttgagtgacaggcaaaccattaaacggttagcatttacaaaatccgctagagcacgttctgtctcttgattgttccacagtaatcagatgaagccgcaatttttgctgcttttcagataaggaaactctgatccattaaaaaaaaaacaacaacaacaacaatttgcatgaaatctttcagtggctgatattctaattgagaacattaagtggattgttcaagtaataacttcatctagcatgtacaaattacagcaccaaggacaaagtcctgaagcatcctttaggtgaaatgaactgagagtgaatggtagcaaggcctggaggtttattaactaacgctttgctctggatcgatgtctgctctccttgttgtcgccacggctccctctcagctcatcaacctccatcagggccgagtttcacacttattagcactgaacagcagacttggaattcattaagtggtggttgaaggcgcgatgagctcttgcttaatgcaacatgtggattgggacagggagtctgttaagagctgtcatcttcttcactgctggggaagggtttctttcccagacctcagggtgctctagtgatggctcttgtttcccacttttgtcaggtctgtcctgtgtcagcgaagaccacgagaagagagtcatgcaacattgatcatactgcctgccttctttcggaagtattgaacttattcaggtatagtcactggaactttctagaatgctttaatggcagtcctactgatttggtatttgccctcgacagcgctggctaaagcagatagaatgtaatttattccagttatgctaatgagcagccataactgtgtgtggggaggggaggcactcaggagcttaccaagactttcactggtggaacaggtcacaaaccagggactgaagatgcaaccgaagaagggatttcagccaataagagggacaccaggaggagaaagtggtacttgaaggctggaagaaggaagagtcagacagctaggtgttccctataaagaaacaaaatagtctatctgcagtgaagaatacagttatattcctatacggcaactatgtaagtagtttaagacagatagatgctaaggtcagaaaatgcaaggaaagttcacattgcagggacgggcaaagtatctgaactgtttaggtctaaggagacttgctttattacatgaccgcttgtctacggggtgggagtggggcgttgcgtgtcagtgccttcctgctggctttgcggttgtgaggtgtgaacaagtcgatgctgcagttttatccttcagttttgatgtctacatccgatgagcaggtggggaataaaaccagggtggagaggaacggtggaggattttagtttaaaacttagctatattctagtctgactggcctgattgcttagtgagcaaaacaagcctgtctgctctatgtggccctggaaaaaacagaaaaggattggttagctgggggtgtggcagggccagtgatcagcctggggcaggcttggcagtgcttctctcactcagagaggttttactgaagccttcagacccagtgctcagcactacaaagcaggtacccgagtgactgtgggactcacccagatgttgatttcacatccagatgttgactggggtttacccttattctgcggggaatcagaaagtgctttacatggaggctgttcctggtcttgatagaaatggacctcttagtgttctggaatgtgaagtgggaattacacgctgatagtctgcagatggtgaaaccggttggtaagttggaggcggttgggaaacagcctggcatcatagctacacgtgcaggattttctttgtagggtcaagaactagtttgaatgaaacggcgcagcagtggatgtgctaaatgattgtggctcattgcagttggctgtttaaaggaggatatccattctgtagatgctgatcgtgtagctcctggaaatgtaacaggagtatgtgaccttcacattataaacaaattagttaagtgtgtcaggtctaatgcattctatggaggatgttaagaagagccgagaaacctgggaatatatagggaccaagagttgacattccattcggttttacttaggatggtcaaaagcctctctactaagcatcatttaagcagagatctgaagcaaccaatcccaggtctcagaaatgtctcattatcctgtagaggaaataaaagttcagaggccccaaggccactctccagagggttgtgttctagcccaaaagcagggagagtgaccagaagagaaactacaactgccttgctgacgaacactgtgtcccagtactgcatcccagtacaagagtcctcagatgacacagaaaaggaagtgctcactctgattgtgagaaatttctagttttttgcttcattggtgatgaccatcagctggtgaatttgctgctgtctttaagaatatttttgcacgaaagagttataacaacatgttagttaaaaataacttattacaatattctacttcctcctatgtattgttaaatgctggcagtgtatgcatggtccacaccacctggcttctcctaaggctttgtgtgtgagacacattgtagaactttaggtcacagtttcttacccgttgctggccataccctcctttctgtcctcagacgcatcccttaccaccatagcgcgcactcccactctgtgggaggccctgtagcagagttcaggtgctgctgcttacgttcttgccagagactctaaagagcatcttctacccttataagtcttactttttaaattattaatttagagacagactctcacgttttgctctgctagcttggaactttctatgtagaccaggctggtcttgaactctcaagggctggaagtattggggtttcttgcctgactctgcctttgtaatgtagagaaacattctttggtcattatgttcctgctaaaggcttccagttttgagatacagaatgacatttttttctccttttttatgtgcatgtgtgttttgctacatgtatgtttatgcatgtgtggtttgcctacatgtatgtctatacaccatatgtgtgcctggtgcctgcaaaggccagaagatggcgtcagatctcttggaactggagttgcaggtggttgtgaggtgccatgtggatgctaggaatcaaatccaggtcccctgcatctcttacagctctttcttgctgtgtcatagcatcacagagagctgcacatagcaagtcagggcaagcatagtaggtctgttctctcttctttttatgccagtcattagtaatgaccctcattatctcctcaaaccctgggttagctttcagtagccgacctttaaaaagcagaaacatgaatttctagattgttacactttctgagtcttagtccttggctctttgtactgtactttaaggtgttgagtctcagccttcctagtgctgtgactctttaagacagttcttcatggtttgttttgttttgttttgttttgttttgttttgtttttcaagacagggtttctctgtatagccttggctgtcctggaactcactctgtagaccaggctggcctcgaactcagaaatctgcctgtctctgcctcccaagtgctgggattagaggtgtgcgccaccactacccggctcccttatgttttaatcctcaatcataccattatttttgttgctacttcatgatctatgtttgccgatggtctcaggtggcccctgtgaaagggttgaaactcaggtcgagaagcggtcactctccctgtgctggctgccgtatcagttacttgtctgctgctatgataaaacaccatgaccaaagaaactgaaagaaagattgagtttgggcgcatggttccatagaggtgagtgttcatcttggccaggaagcatggcagccagcagcaacaggtatgggcaggagcagggggctgagaaagcacatcttttacaacaagcacaaagcagagagagcacactgtcccctgatgtgcctctgcagcttctggacttctccagatagttccaccagctggggacaaagtgctcaaaagcctgaatctttgggggacgttctttcaaataaccacagctcttttctcattgctgagacaaaatacacgcagtagcaacttaagggaggaagggtttgttcatggattttgggggatttatcatggagtaggaggcatggtggtgggagtctcccctggcagcttgctcatgtctgtcaaaccaagaatcagagagctctagcctggaattagaggcaggcataaccttccaaatcttttacccaaaccccttaacactactacatcccagaggatccatgacttcctaaaatagtaagaccaactgctcaaactctgaccttattggggcacatttcatcctcaaactataacacaccctctctggttggtttgtttgttggtgctacaagacgactggccaacagtactgacttcatatacttggagcggagagagcacttgcttatctaaatactttctttgcagccgatatgcccaggctaagtgtgttactctagtgggtgtttatgtgcattcaaggcatgtaaatggctcttagcatatgagtagctataaagcttccatctccttcattccacaggtggtttagagctgctttggtttgatgacttaccgtgggatttgatatccttatggagaaaggattaaaagataactgtcttttgatgaagggaatgataattttcaagtctaaagatactttaatttgagtaataataataacagtgataaacctgcgtgtttgggtagacagatggctcagcagagcagcatgtggggaatgtgtgtcacctgagtcattgagtacttgaacaattgttaatttgtttcccatgaaatctgtagttttttggataaagcggagtgggataaatgctgtgaaagtgaagagatgcgttttatggacggaaacttcatgcagctgcctgagacgccattcccacacctcttctctgagagtgctcagcacctgaggaacccccacccccaccctcaccccctggcagtttttctctcttggctctcacgttgattggcatgaagagtatctcctttgtgagctgtcttgtctccagcctggatgcatgtgctatgccctaggtcatgtcataggacatttaaagcagtgtcaggtgacactggctgtttttaaatggagtcttattgtcttggtctagagtgacttggtgtttcctttcgttcatccactccatctgtctttgtgtttgttcatataacatttattgagtatctgcattgtgttagggcctgaaatagtctgtgactgtacatcttcgcttcccctttaaagggaactcccagaagcagtgatgctgctgaggggaggagcaagtagttattagcatatgcaagcccccgtccccctcagtccctagtacccttttatattcagtggctctgaactgctctttgtctcctaatgtgcttaattctctgttattttcttctgagaatctatttggtttttaatatggagaggcataacccgcacttgcttagtaagtgtctatttaaaaggaataatagacatcttggctgtcattcagcggacactcagttctttaatagaagacatttaagctcaacctcagagcaacctctcagagatggaactaagaacctgctggcattattttcctataaagtcagaggaagagtccttcagtttggaaagataggcactaactcttcaggtgagctgacaatggctgcatctcaggaatgtagtcacagatggttgtctgagccactggagtgctgaagggatacttcctaagagtatgatgtctagaaaggccagagcattgaggggaggttgaagagggttggtgagttcttatttatagtttcatctaatggctgcatattgtcctggccagggaaccctgatgtgagctaaccttattctttatcatgtagatgcaatgcacagagttgagaactttaggattgttccatgaattgcattgcactgggggaataatttgagcactttatgttctgaggtggctcctgtaagaacagtgatcatctactttcagcttattcttcaaagatactaaaaataactagttgggacatgaaaacataggatatactatctgatgttgccagggtaccgtatggattatcccaagactcgatgagagctgttgtggctcgtggttacttggctagtggtggatttattcctggctaaatcttgagcctcctggacttcattcagcttccccagaccaaaggtggcctccttaggttctgctaaatttcttagctcattggttacttcttgcgcgtgccgacttgaccagcaagaatgacgctgcaacaggatccttctgcacacgtttattgggagagcttgattgcagaggcgaagagaccccgaacccagaactggtgctgcttatataggcctaggagaggcgtgtctcacacccggattggttatgcactaagcctcatttgcatgttcctcatctgattggctactctctctgtacctcacagagcctcattatcatgcctcatttgcatgtctcacatctgattggttatactctcaaagcctcattatcatgcccgggccaggcagtgtctttgcaaaaaactttactgcatatgtacacattggttgtttgtccaaacttaggcgtggtggccaacagtagtcagtgccactctgcaacggcacatgtggcttcccacagttactaacctctctgaatagaactatatgtatcattctggtatctgagtggttcaagtgtctctgcaagacactagtcctgtctgagctccttgttcaatgtttgaaataacccagaggagggccctccatgttctttcctgtgcttcttttttatagctttgtgatacagcccacttaatagcacccaaaagtagtgttgccaccaagggtcccatggctccattctcattggcatcagaatacaacgaggcttcagttgagaagatgaaaacacttgagatctctggcagcatgcattcactggtgccgctcatgctgtgagtttcctagctgatctagagattgcatggcaggcagcaggcctgtgtttaaagtttgtccctgcctagttttgtttgtttagaccaaaatgactaggaagattctcttgcaaaccgtgaggggttatccatacaggcatccccctctgggtcttttttttttttttaacctggaagtaaagaatattttctttctgagctcaacactttctgggcaaaacaacaacaacaaaccaaaaaaaacccaaaaacgtacatgtgtactcttaataatgagtactaacgttggcttttgtgtgtcaagtttcgttcccagctttcatgatgcgtttatattttatgctgcattcacagtaatggacttacatatattcatgtatttgacattagtgtgatttttggtttgcctttattgtgcaccctcgctaaccagaagggatacatgcgagttcaatataaattttttaattactattttattctatgtgtatgagtttttctctgtgtgttatgttagacatgccagaagaggatattggattctctgcaactggggtcacaggtcgttatgagctaccatgtgggtgctgagatttgaacttgggttctctgggagagcatctagttctcttaaccactgagctatctatctctctggccctcagcattcattctttattcataatttattcataacttacttttatgtttgctcagaaacccgagaaggaaaccacctgagggtgaatttatacgaggccattggaaagcaggttcacatgagattccgatgtttccatagtctcaggggtcttcatctctgtcttctccacattctacctcctggagccacaagcattggaaattggtattaagagaggtttgttttgttttgttttaaattgaattttggagcctcagtgtcctcttctggatcctgttcccccctccccccaacacacacacacacacacacacacacacacacacacacacaagtaaaatcttttcatttgggtttcatagggaaacactgttgagtattagtgagcaggtggtatttgtgggggcgtgttcatacagctttattaataaagttctaagaggacttgggttgtagctcaggacaaagaacataactactgtattccaggccctgggttcactccccacagacatagaaatgtgagtcttatgtaatatgaagctgaggaggctttttcaactcagatgtctgtgattttgtgacttggctgttagctttcacattaacttcaagctgtgctttgcagtgacttgaggtccagggtctgtaaccttgctaaatcaagcagagcagacctgttctcacttgctgtctgtctgtcccgctgtcctatcattgtcagccaaggaattggatgtgttttcttgctgaactcccttctctctgcttttcccttttggggagctttactgagcttcattttttttttctgtctgtcatggatttccgttgttataacgacttaaatgagtattgacctttgatcctgtagaaactgtcttttacccctctctctctctcatgcgtgtgatttaaggtgtttggtttttttgtttgtttgttttgtttcctggtaaagaagtgaggcgtgacaaagttattatccccttccttaggaacttttgtgttggcgctctgtacagttaaaagagtaaatgagttttggggcctgttgggaaaagctaataatttacaacagactttctttggaaagtagatctcaaattccaggcagctgatttgcaagcatacctttgactcctaaggcatggcttcttaaatagttgactaagcctgcggctttgttttggttccttcaagtttgcccttgtttggtttcatgaaatcggaacccaaagcaaggatttgagtgcaggtagggttttgttgttgttgttgttgttattttgtttttccagatgatcccaggaaggagggctgaagtgacagggacaaagaagagttaatggcaagtgtgccatgaaggttgatgctgttggcaatctgcttctgccctgattgctctctctgcttgatgggagctggaatatttacagtcattccatagtcttcagtcaccttgtgctctcggcggccacttatgtccccatgcttctgggctgtgttggctttctagctaagttgtcaactctgtcccagagaagaaatagagagaccctgcactgcctgtggtgagcgctttctgcatggagcccctcactgtggctacggttggaatgagcaagcctgatgaaatgaaacgagccattctgagcgttgattctcactaaccgccatcagtaaaccaaaactatatgttttttttaggagaccaccactcatctaccactaagaagggaaatacacagccagacacgtagtctaggactgtagtgtaggactgttctctgtgctgtagtgacttaaagatatgataggatcgtgatgtgagtggtagacctgccattttcattttgagaatgaaccaaagagcccattttagaggatggttgcttgatagggaaaagagaaagaaggtagatctttgggatctgacctaagattgaacgtagagatggagtctagtttactcctttcctcttgcctctcacccctacgcacttgctgacaacccttgaccccagagcaggtgtgagcatccaggtgctgagcagaggaggcccctgtctaccctaagagctccctaggacacaggcagcctgcacggtccaatgaagtctttgttgcttaagagttcaaagtgcgacaactggtctctgattcttttgtttaaaaaaaaaaatcacttatttaagcttagcctctttaattaaagaaggcatttgcagggaacaaaatagtccatttccctcataggaactcagagttaaaatacaaataaaaatttatccaaccacttacttatattaaaactaatattcctttaatttatattaaaaccaatttacctctttacatactctgttggtattttattttttaatagccatagtagggatataactaagtaaaaggacacgtgataagaatgtttaagctctggctttaatccccagctccagaaacaaaccaaaccaaaacttctaatcctagaagtcccttcccaagactagagagagtccctgtatactccagttgcctctgagcgagcatgacaggcatagctgagtgtgactttgggttgtaaaaggttctgtaaattctgcttactgctcttgggacactagttctggggatgctagctgatatagagaaatataacttccctgaagtagattcccatataggagaagccatttgtagccacattagcccatagcccggctaaggtctcagttcacagccaccattaagcagcaggttgaggggaactgtctcagacagccatccacttgaggctgcagaagactccagccacgcctggagaaggattatagttgggtgggaaatcctcacccaggactgtcgagcccagctgttttttaattcttgagcctcaagttatgagtcaagtaaaatggttgtttcaagccactatgttttaaggtactttgctacttagtaactggaggataagatatgctaagaaataaaaatatttaaaatcaatggtggtgtagtctgagatatattctgtgatttaccttgcttctgaatagtctagatattatttgaacatcttatgaacaatgaacattttctcccctttcaataccagggctagaatccagatcttttgtgtactagacaagtgtttgttaacccaacaagctcttgccctgttgtggggacttctggccaattactgaggttactgaggatgctaagtaaagatgccttggtgcaaaaccaccataacaacacagaaagacctgaaacctcaataaccggactctcttcttccttgagaaaagaagcatgcagtctctcttcttttccctggactattttatctgtgatgctttgaatatgcttgccccagggagtgacactattaggtgtggcattgttggagtaggtgtggccatgttggaggaagtgtgtcattgtgggagtgggttttaagaccctcatcctagcttcctggacctccagttttctcctgtttgcctttggaacaagattaaagagctctcagcgcctcctgcaccatgtttgctgggacactgtcatccttcccaccttgatgataatgaattgaacctctgaacctgtaagccagccgcaattagttgccctcataagagttgccttggtcatggtgtctgttcatagcagtacaaccctaactaagacattatccaaaggtttgtaccacaagttagccaaaaaccctcaccaaggcatgcaaatcaggaggttcaagcctgggaggtgcatacctgaaaatatcatggcaggtggttttggacttactcagacacaaaaagaaaaaacaacgaacaaacaaacaaacaaccctaatcttggaatttgtaaggaaaaagaaattagatgttgacctctttgggcgagaattgttgctgcttgtattgtggtttgtattttttctagaatagtgcactgagttacttatttaaggtgtcaccattctcttcctggaagtggcctaagaagaaatagctactctcctaacccagaaaaccccaccaaggcatgcaaatcaggaggctcaagcctgggagatgcatatctgaaaaccaccaactctctgacaggtgtcactttaaagaacggatgtgagccattggccagtgtgatgctggagggtcctgtggtcatgccagaggtggggctaagtgggacagtcacctcaaaacagtgttgaaattttgctgcccaagtatctaagtgcagaaagtgtggttgagcatagggtgcggatgtgggttcgctgcttgtaggatccttaggctgatggagggagggcctgcagacactttcggggcccagagctagattagtgcagatgtgagttcccttggccacgctgggatgctcatcactgaaaaggagcaaattgttgcttagttagaggagctggatgcacagaaaagatgcctcagacaaaacaaaagttacggcactgggataaattgctcacagactaagtgcaaagaggagtagacatgaatgaaaacgaacggatttctattcaccattgaagaaaaaagaagaaacacctcctggcggagttcaaagccttagcaagtaaaaacacaaatgctaattagtagtacaaatctttgggtaagatagagccaggagacgattgtctgcaagcttcctttcttgaggagaaaaagtcaggttgttgagggttgggtctttttcttagcatcctcgcagcagcaactgagggtacatctagtgcaacgagagactagatgctccggctggcaagtggagtggttagagccactctcgtaaccagagctccacgccacatcacctggtacaaagaaccctagtttttatatctttggcttctcttcagtgagttatccttgtctttatactagaaagttttcaatttctttcttgattttcataattgtttggaggagcttagagagatggcttacaggttaagagcactggctgttttcccagtgggcctgagttcaattcccagcacccacatggcagctcacaactatctgactccagttctaagggatctaacaccctcacacagatatacacgcaggcaaaacaccagtgcatataaaataaaataaataatttaagaaaatagaatgtttgggtacttacagtctatccatattgggaacggtgactgactaacagattgttagttcattattgctgttactctggtgtcatatgttcagttttgtttacttttgaaactcaaggactgactaacagattgttagttcattattgctgttactctggtgttatatgttcagtttacttttgaaactcaaggtagacttcacacatggattatagggtgggtgaagttcagtgggataaaaaagatagagaatgaaaacgagtgagcccagactacatttgatcacagtgtttattcaggaccgtgtcatcatcaacagtccgccccaaattcactgtgtcctagtgaagatacaatcagcacagaaaacatgaccactttcctagagcgtgtgtttccagttgattaaatttgacttgtgtgatttgcttcataattgaatctgtttcttagcactacactaatattaggtttcctcggagacatttataaataccggctgagtcagagtgctagcctggccttaagtagtttagcaaaacctttagaaaggtggatttctttttaaattattaaggataactacagaagcagatgcagccactgtgcaggggaggcttgcagccactgtgcagggaaggcttgcgatgtgtcttagtaagcgaggacactgctttatttactgtactgattttgaaggtgcagggggcgagggcagaagagatggtggcactttcaagagtcatttcagatctgttattcaaaaggagactggatgagtgtctgtgatcccagtgtcagccattttacaactttctgcagctgttgaagagagcaggcatgggctggtgtgtcctgtttattactaagggagaaactccattctccattcttagttgtatacttctgaagacctgagagaagtgtagacagagccttgtttacaaaggtttcttaggtgaccctctttttctttaaacgccatctgtgtttcctccaagccatgcccagtgccagtgtgcctttgggtggagaggcctcatccgtgggaacacacatctacagttaccatctaagagcgatgggcagagttctcatggacgctggatgactgcttctctagtcttcaggctcctccactagccttgtatttcaacaaatgtggattcatcctacttggctcactgcgaggaggcagatgccccagtttctgccactttatttttatggattcctttttggttttcaaatcttttggcaaggagattgctgataaccgactccccagtgcagccttcccaaagacccagggacctgggagcttagtgtcagaatgggtgtcatctacagcgttgggttctttggaagagggccaaaagctggaaactgcttgtgcgttttgttttggaatgaaatgtctgaatgggctgtctgaaaggttgcttttccttgcttaaaacctctgatataaaagcagacgtgaaggctgcctgcctctgtagcttgagtgctctggtctctcccacaggatccactgtggtctgacccagagtactggggacagagagagggcagattctcagcttgaacacagccagtgtgagccacgggtgtggtgctgtgctagggaaaccatgcagggggtgtaatgggtggaatcataagtctctgggctctgccacagccgggttggggggggcggggagaggacgataaggaattagtggggtaccgagacctagtgggggcagctttcagaaagcctacacgttatctggatgtttcttatagcttcaggttgacattttctttgggactacacagatgacagccctccgaacaggcagcatcatagctgagttcagaaagagcaaccgtgctgcctagctccgtgagctccggagtgcacagccagctcgcaggacagttctataccatagttgtgaataggagtagtttgttgttgttagttacattttacttaagctcatttaatgaccaagtctgctatgccccaacacaaggttctgctgggcctttaatctttcttgatgaggatgctcctcccatatggaggaatattagtgagccaggctgagctcatgatataaagcatgagatgcatgccaggccacccctttaaagattaaagaaaacaatgctgggtgcttccagcttctaaggtttcagaaaagagactgaaaccttgcaccaaagaggaagcaaaatgtttgtaccagagaaacccagaaactcttgtgctttctgtccaataaacaaacaaacgggtccactcttcaacgatggtgtggagaggctggtcctggcttatggtttttttttttttttttttttttctgctcatagaaggtagtgtggttacatagcagcctcctggagcaaagcctatttcttctggctgcattgcatgttatgtagaaagcctctgtctcctgggaaagacagggcagatactgactatgaaaccttgtgctggatttcaagttggagggaaagggaggaaggaaaagttgagtcacatttgtgtagaactttgaatgatatcattacatagtttgccttttaaatttattttaagttaaatttttagaaatttgtagagtgttggaaatcaagccagggtcttgggtatgctaagtatccattctaccactggtaatatccctgaatgaaaaaataaaaaggaaaggatatgatggttgctaggtatggtggaagagaaagcttattatagacatctgggagagcacagccagaggcagacgtgtctgggagagtccagagtagacaggacctagaaccatgcatttgaggcggggaggggcaaggaggggtgagagaggggaagaagcagatggagcagccaggagccccaaaagagaggagatgaaaatggttgaattatatagggaagagcatctgggagaaggaagccagcttcccttctccctgggatggagaagtatagatggaaaggccaggtaaccaaaatgggtgaattatatagggaagggcatctgggagaagggaagccgagcccctgggatggaaaagtttcgataggggacagagtatgccagcaaggacggtcccttgacaggtgggaactgaggggagcagggagaacctggtcccctttcatatgctaatgggcacctcagccatttgtcccaggtttgaaacctaacaatccctaggtcaagactttattttatacatcatttacctttaagtttgtgaagaatcccacgttgtgatgtattatatgccaaataactgaatgtgttattttaggctatattagtgatctcttcacccagaggcagttgtgcacacatggagtctctgctggaggctgaggaaatgcaaaggagagaagatgaactgaaggaaaggcatgggtgacttctgaagatagtttgccaccaagtggttcagtggctggatgtggtggcccatctcctgaggggttgggagagctggctctgcatcacagcagaaagccatgagaaatgccatgagtgggcaagacaggctggagctattgcagttttctgggctaaagcaatcactgtgccctgaaccaggcaggaagccaggatagaacaaagcaaataaatagcactggcagagacacgagaggcatctcggaggcaacgaatttcctcctgtgtgtcttttatttctcatggacacagctcaactaggaaggaggaggaggactgggggaggaggcgttgcctagaaatagaggctgggttttctagggtttacaacctgctgtctgcctgttgccagagagtctctgcctattccattattattctccctaaggaaggggtgagaagattggtgtgggaagagttccagctgcccctgcctgccttcatcccctcggtggctgttctctgatgtgacctgctgggacgtgacttgttcatctccttgatgggtaccacgttttcctcctctgaatgtctcttttgtatctctagttcaaatgcagcccggctgtatactgctgtccctgaattcactctttacctgatttttgactcctttatcaacagttgattttttttaaggtttatttatttattatatgtatgtgagtacactgtagctatccacaccagaagagggtatcagctcccattacagataatcttgagccaccatgtggttgctgggaattgaacttaggacctctggatgagcagccagtgctcttaaccgctgagccatctctccacccctccttgccagcattttaacatctttttgcagattccaggttcccagactctcatcttcaaaagtacaagtttctttccgatctccttctcaacctcggcatgtatctttgtttctttttctctagatgcagagttactaggagaagccatccaagctttgcttgtaccatcccagcctgtagagctgctaccatctttggaactctcagtgactggactgggatactacattctaaatctccagtctcccagggcttccctcctgtgtgaatggctttggatgcaagtatcagaaaacccatgaagaagtctggaagctttcaagcgtcccagtggctccattcattgtcttaaaggggcaaatgtattactcaggctttggcccctgtgtgctgttcctccaaacattgcctagaggctcattagccagggttttatgttaggagcttgcctaagcttatctatggtaagaggcttgggcttacctcagaggtttagaatcttccatttacagcctggggttgagagtgaactcaggctccatacaagcatgtagctctccagtataatgggaacatacatataaacacacacacacacacacacacatgtatatatgtacatacatacatatacatatatacatgtagttccagtgactctctgtatagtgggaatgatggtgtccatgagagtgactgctaggctggttgcagaggctttcacagcccctactcccctgaagccttttgctctttgatttatttgaacagtgtgtttcatttcctgcagtaattttgctcctctctttctcttaggctttgccttccctgttatgtggccctcactggcccttcttgttctgcactgaccttggtcatcctaatgattcctatgatttcatctgatagctctcagctcaggattctgaaatccgcctcttgcacccctcatccttattcttatgtttggcatcttgttgaatcagttcacttataatgaccattaataattctcatgtttcccgctctccctaaagtatgggacttttcattttcctctttcattactgcacttgttatttcaaaacatagatacttcagtaacaaacaaacagcttattcagtttttcttacagctaggtactgtcatatgactaaagctggcacatgcatatgcctatgtgtatgtgtgtacctgagtgcatggatatgcatgatgaacatgcaaaagagaggggtgggagagagagagagagagagagaatgaatcaccgagacagagacagactgacttagcagccacccagaagtctaataaaaagacagctgtttagctgagagcctatccttactggttttcttttcccttcatcttgtcttaaaatggaagatgacaacattttagaagctgttttggaccttgtagaagtcttggaatccagggtagaaggaaggatgctgggtactttatgcccaaagaatggaccagtcaattttggaaagactttctgtagctttttatgtaacaggtggtctaattcaggtctcattcaggatgctatagcaaattatcccaaactgggcagtttataaacagcagaagtctatcattcatcattttggaggctgatagtccactgtcaaggtgtttcaggtttggtgtgtgttgaaggctttgtgcctcatagatggtctttcctctgtctcggggcagacatcagggcaggactgcataccgggaccctttaaaatcaggctaattgtgctctagactaattactgctcagaggtcttacctaatccctcactgtggtgactaggtgtcatcctgtgtgaccacgggggtgggggtgggcgtgggtaagaatggaggacacagacactcaggtcaaggcagcagctaagctctaccctctgccaatttcagccagatacatctcaaagctgtttctactctgttgcctaagcagaacatagctctgtagttccctctcaacgtttcatgggatatactttggggaaaaataaaccaagcaaactattcaatatctacaggtttgttcacactaaatagtgtggctgttggaagcaggggcgacgtgcaaagtggagaaagctcatgttttcttagtggaactatcatttggttccactacagacagtgcctgcaggcaccagcgctgcgaggctgaagggctgcggaagacagggtggtaggttagagattcttggcagttaagtagctggtgggagccagtagcactgtggatgcagcactcaaactagatacgtagagtgccgcaaaggtgtgtgggtgtgtcatatgtacgttttgtttgcagctgcattgtttgaacacgaaacgggaagcaatataaatgtctgggtggatagatatctgtatatttcaccagtacaattctgtagaacagctcaaaggaaacaaccaggattacatgtgacattatgggcaagactgaagaataatgtacagaaaaataagttgttgattattgtcttagttagggttttactgctgtgaacagacaccatgaccaaggcaagtcttataaaaacaacatttaattggggctggcttacaggttcagaggttcagtccattatcatcaaagagagagcatggcagtatccaggcaggcatgacgcaggaggagcagagagttctatgtcttcatccaaaggctgctagtggaagactgacttccaggcaactagggtgaggatcttatacccacacccacagtgacacacccattccgaccaggtcacacctattccaacaaggccacaccttcatatggtgccactccctggtccaaggatatacaaaccatcacaattatgtataacatgaagtcattagctaaaatgaaaatgattcacagatgccctaccgaaggcctctctaacgtccactagatatgctcttaggagctcagctatttatcttctcttccattctttctattcaacttgcttttcaccttagtaccagtctggtttcctgctgcgtgtgggtcaggactggctgacatcaatggcattcaacatgtttgccagagtcatctttctgagcctatgtctaccctgtcttcagcagccccacccctccccgccgtcccctgcagccctggtgcccgcaggccctgtccccagctggaatgactgttcttcaccttgtctttttttgttcacctggcagaagtctgcatagaaatcttcaaagcccagagctggggttgttttttgggtcaaaagtggacatttactttcccatggatgtgcggacttcattctcgcaggaggggcaagaaggtggctcgctgggctgcagcttgaccttgttaagggcagtggtcttaggggcatcttaaggcctcgaggctctttgccagattattgtgcactgtggaggccactagaggttgcattggagaccgtcttcatttcttacaggctgtgaatcattcctaactaaacagttttctttccctgtctgggatcaggttgaggaggacttttcaaacttaatttttgaggaaaacaaacaggtttggatcccttagtcatgaagttggttgtattttagggagcagtggagataatcctgctgatgactcctctgccaggaggaacctcagaatgaattaggtagagacaaagggattgcttttaggagactgtgctggccccatgcagtggattaaccccagttctaggcaggtactcaaaaccgagctatcacttagtcccttctttacagtttatagcttttggcaaagtgtctcacttcactgccctggccctcacatccctctgtagcccaagcaagctttgaacatggggtcctcatgctgaagcctccccagtagcagggatgtaggcctggctgccacgccctctcctccctcccttctcctgtctttcccctctgctttactaatgctatttctgttcattgcaagataaacatcagagaacataaaataaaatttacagaggaaaattaaatgtcagtgtttgtagggggtgagggcacccccaaatacagcagtgccttgcatggaaaaggggtccaacaaattttccaacaaaacctaacctctatattatgttaatcgatcattgccattctttttaaattcaggcagaatggtaactttattgtctaaattttattttactgtagatacaagggagagtgcagccagaggcagaaacatctggggagtctgaatcaaacaagtgaagccatgtgaggagaggggaaagtattgctgaccaagaagggtggcccaggccaggagaccagtgtaaccaaaatggttgagttatataggggccagagaagctggggaggggagttccgcccaatagctgggctggagagttcagagtatggggagggtgtgccagccaagagggccctttaacagctagagactgagggatgctggaagaaacaggcagccagcattctctttgatatgttaatgggcacctcaggcatttgtcctgggtttgagacctaacagttatgaatatgtaattattttaaataaaaaaatctcttatgcctgttttagtattttactgtgtattatacagcctgtggtgtaaatgcaccatccactgtcaatcatttaatgacttttttgtacctgttttattttttttaactaccacaagccacaggaaaccttgaccatatttttcaaagaggtctaaagagagaacagactactctaaggtctttgtgatcgtcctccagtggctatacacaattttgaagaccatgtgttacatggaatgaacctgtacaacagagctaaagtcagaaaagtggctttttatggatttcctctctggatgtttcagaaagtctaagtgttgaatgatgggcaaggaatagacaatggatgagagctgacttagttcagctcgcaccacactccattccactgcatttcaagggcgtcaaacacctgggaactacccacttagatggaggctgcctggaaaactcagtttacaggctccatctcgagacggaggccttctgaacagttagccacccttccctggtattgatcttcgtgatttccaacttaactttgagaccgctctgccccactgagactattgagcgtttgcgtcctcctcagggttgggagcaaagaggcatgggtgttttcagtaaaatgctgtttttcatgagagttgtcttctgtctaggcccagcgggcgccttcttctctagcaggtgatgaagggctttgatttggttggcaaatacttcacttcactcctgttcaatgaaaattctgtctttaatccaaggaatttgattgtcattagagcttatgactcagacacacaaaagggttttaatgaaaagatgactgctttccagacacacagcaaaggagacttacccttgccggtaaggtcagtgttaagcatgctgtgattatctgtgggattttcacaataaacacctactaagatgattgatgcaggtgtctttcagatgaggtctgtcctgcaacgtgagattcaactttcatatcaaaacaacactctgggatgactttttctcccgttacttctgatcctatgtttggttccagctgagaaaattactttctcacaggtttccattttaaaactatcacacattaggtctaactctgtgggtgtgcgtgcgtgcgtgcgtgtgtgcgtgcgtgtgtgtgtgtgtgtgtgtgtgtgtgtatcctgcaaagtttgtcccattctgttcttttctttttccaagctttgccttccccatcttctccatggactatttatagaaaataaagctggtgtcatgccagcagttccacagtttattgttatagggtttctatttattctatgcataatacccatgaagatcttacatagctctgtgtgtgtgtctgtgagagacagacagacagacagacagacagagacagagatagagagacagagagagagacagagagagagagagaggtgcgccatgcatggaacacacacacacacacacacacacacacacacaggtcagaggacgactagtgggactccgagttccttctccttccaccacgtgtagcttgcatgtcttcataggtaccaccttcacctcgtgaaccttctcactggcccacggggcttttgttgttgatgtttgttgttgctgtagttttgttttcagggttatgctctaaaaaacttacagtgttatggagtgactcgtttttctctggaatagcagtagaatgggaaatttggtcaacgttccaagcggtcacactgtgggtgaatcttctctgggaattagactaacccatgcctgccactgtccttgttcatgtctgggagttttgtccttttcgcttcctcctaattattcatacacaaaggaaaatgttatacacatacaattatagcgcaaacgtgggacctactcagagtccagtggagggagaaacattcttaggtaggtgcatgtagttgcttttgacactcaagggtctgttgtttttgtcaccaagatggtgttaatgaattatgaagctgaaatgtttgtttgaccttgtctttttggtggtcctcatggtctataactggatgtcccttcctgtccttgaatttccgttttaactttatgccatgagcctccctctcgcctgggctgccctgtgcaggcatctgttggctcggcctgttgtcactctgtgagtcattgctggccttattaaactattttgggcagcggcttgtccattctcctcctgtgaaccgtgaagcctagaattgcttcggcagcatccttcggtcacgtgtggaatttgaatgtgaagggaaggcagctgactggttacagcccggcatctcacctcaccacagtaggctgtctgtctgcaggggccactttgagtttgaaatgtttcttttgttttaaaaaggaatgtcagaaatgccattcttgtcaaggcgcgtctcaaatgcctgactccatcagcttgtcaggttgggttgttacaacaaaataccaaaaactgcgtagattaaaaagaacagaagtgtatttctcattgttccaaagactagagagcccaagattgaagtgacagccagcatggcctctcctgagagtgtctttcttgattcctgggtcataccttttgggattgtctttgccgggtggagcaggtagcactttggggcccacttttttcaagcaggaggttattgatctcatccgtaagagctttgccttcctaacctaattgatcccttacccagctcccactgccatcagattggtgatgagattttactttatgaaaactaggggagctaggcattgagacctcagcaccccctttctccttgcattttttcttcacatattcatgctcctctcatgtgttggtgattgctcactcaagtgtgcaagcctatctcaggtccacggtccacagtgtggccttgccaggaaagatagtgtaggatttagtgatgagaaggtggcctgccttcaggtcccatcatggaggcaatgatgaagtctcattaagctcagagactggatgtggggaaggtgtgcccagtctcacagttgcattccggcctgcgagaagacacgccggagctggttgatgatatccaccgaccacggcgtagacctagactgctggcgttgtccagaggcattagagttcatcatctctgagtagggatccgtcactgagaccgacatgcttgcctaatggcacatcactgtatgtggagggaagaggaccagacctacctaggctttctaattgccagagttattaaaccttgtagcctgcacgtgctcctggctcagactcacagttgagttataggctcatttcttttttgaactaatgttttattatgtaggccaagctggcctttgcaatctgcctgccttgtttcacacttttattcacctacccccttgaaacatgatacaggcaatacattcattccctactggtgctgtaatggatcagttctggaagtcggatgctgaaagccaggggccggcaaggggaaaacagtgtctcccaggggttctgatagggaccacacgccctgttctctccatcttgggaagactactgcagttcttggctaatggtctcaagtcactccaaatttttttcctctgcttctgtgattacattgctaatgctcgtcctgtttcccattaaagggtcctcttgcttaggtagggcccgcctggatagtctgaaacagtcttcccatgtccagggattatcattaccatgcttgccaggtcccttttgccatttaagatggatggttgtgggtctagggattggacccacacgtctttggtgctactagtctgcagactaaagacaggaacttgcttcacaatccagaattctcaaattctatctccttccattctgactttttttttcaaattcagtcacacattgcagtttattctcgcacacttttctagccagacacttcctttccctggtgtctcacaggaggagacccttcagagaaggcttgttacagaaatgaggctctgactgcatccccgtgactacagacgaggcatctcaccttcatgtgaaggggcgatggtgggggaatggacatctgggggcagtgtcttcacacagctctttttctgtctctgaacacatccttcctgtgagaatgttaagtaatttttggagctaaaaaaaaaaaaagacatctccatattcagccatacttgaatttggcatttggactggagggaagtttttgtttttttgtttccagatattggttttgtttgaaatattgtcagtgaaatctcactggcgaattcagctcatgaacatgaacaggtccttcatttaaacccagggtccagagactggtagagtggcataggtctgtagttagctacagagagagtgaagcaggaggattgtgcattctaggctagcctgggcaacacagagagatggcatttcagagtcagtaaacagacctgggtcctttaaaccttagagacattaccagaccttcaggggaccgacctaacttaatgatcacttttctggagggaatgtaccttgactgtcattggatcttcaagaaggagagatctgagaaaggctaatgatcacctgggttggcagcaggtagattatcttccatcttcccttgggtaaaggtccctggaagtatattcatatttctttttagtacggaatcttttagccagcgaggtgagtttcctcgttcctgtgaaatggacttcccaccgaagcccatgtctttgctgtcagtggtagaagaaggcttattcagtttctgctggcatagtgtgagctctctctagatatggggagcctttgctcagtgaattctgaattttggataggcaatgtatgatttgtgtgtttagataggaattgaagataaaaaataaatgtcaaggtttcctctccactgtccccaaacaccagatgttttagtcgattttttttctttagtaagtacttctttgcaacttaaaaaaacaaaacaaaaaaaaaaaaaaacaaagcaccctcatttgttttgctgtgcatctgttcccagctttggtcacctctgacccagctctcctactccttatggttctttgtaaagagcgcatggctcctgccctcctcctccaactctgcctgttccattaacctcacctttccttatgggaaccaagagacagacatggcttctggcatttgcttagaagctggtagggttacctcatatacgcagcagcacaggttgagaccggggtcactctgtgcagcttaagacttcagaaggaaaatacgaatggccagaagtgcgtgtttatgcattttcaccgagaacgtctaagaagtaggtataatttgaaattaagctcggatgaccaccacagagcaggggtcagcaatgcggcctgaagacccaagcagaggagcatcaaatgaggcttctttctagatgcacgtgtattgggggagttagttcttcttcattgactagggtgtataccaactctctcggaaaaccacagccgtcatgcagaacattgctggcctacgaaaggactccgacgctcttagcaaaactgattcataacaagaacttcagtactcttttctttggtccagcttacctatttattttatacttatttactgatgagggggcatgctggtggcaaggtgtgcatgtggaggtgaggggacaacttagttctcttgttcaaccatgtggggtttggggaatccaactcaggtcatctggcttcgtagcaggcactctcccaactgagccatctagatggctctttacttaattatttatcactaataggaaaaataaatgagatgagatagtttgtttttctgacacccgagggctctttggtgagaaggttggtcacgacagtcaaccccctagctcctgacccattattcattatacctaatttgcccagtatcctaaggatgcgggtttcttcgtgaggaggaacaaaatggaattcatgctttaagctttgaaatttcataaattaaactcatggaagtttacatactcctgcacacgactgactgaagcctggcatcccacgtgttgaccttggtcatgagagcataaagtggagaagccactttggaacataagttgcagtcagtagagttaaacatacccagtggcctacacatttgccccagagaagggcctttatgcaaatgttcatggcaggttaatgttgataatccagccttcatttgtttgttcatcaggccagatcagataaattgcactggtatccactgagccatgggaataaggaactgggaatctgaatgacacttactggaagctggacccaagctttgtacattgtgctgtcccagggctaaggagtcctaggacaagtcacacgatggcagtaacagaggactcgggtgtggagctgcaggcacaccgcagactgtgagggaggttttgaatgagacgtgttccctctttgacggaagtggtggttatgtaggtggatatagttgttacaaacgcatcaaactgacacttaaaaggagtgcatttcagtatatcgagtataccttaatacaagttattttaaaaagagcagagggcaggtaaggctctggagggcaaagcgttactggtcgaaagcacaaactacttttgtgatctcagtgactcatctccggtctccttttctgtcatactgtggtccttctgtcattgtcccttgccacttgtctgagcagacagacagaactgagagccagcatgccgtgaggaaactgaagagtccacccatgcacaagttatttctgtacccctgggatgttttgccatcttatgcagcaattgtaagaatcactctgagatccagttattaattatttacttaccaactttttcactacatacctgtatatacaaataaaataatacccagaaaatgccaagagcttttttgttccctggaggaagtagagagggtttgtagaaagagtaggtagaatttattgtcatattctctgcctaaaaagtctaaaaataagaacgttggcgatcacagttagtgttctgagtcataaaatgtaaatcccgtaagcctggagcttagaaaaatgctgttcagaaacctctaaactgcatataaaatgtatgtctgccttctgccaactcccctgccagctcctggcttcagagctgtctctgaaatatctaggactcactttgaacatgagtccctgaaagtgggaccaagatggagagaatggggcattgtgtccccccgccaagagtgctcccctgtcctgtgcctcttggaacccgagactcatcgtggaacagctaattgaataatcatcagtgcccatatctactcaaatctttttaatccctaactaagagaaagcaaaggtcaggccctttgccacactgctttgtatgaagtgttatctaccttatcagcactgccctgtggctgtgaatagctcactgtaggctgtctccatgctgaataccaagaaggcccttgtgacagggcagggagatggctctaagtctaagagcagttgctacatacatacacatgctggcctgagtttgaatctccagcatccacctaaaaatcaggcctggtcctacacgtacctgtaaccttagtactacgggagggggaaagggcaagttgcagtgaaaaagaaaaacctaattccaagggaataaagcagggatcaacagtggagtggtcctgatggtctcttctggcttccatatgtgtggctaatacattcctgtacacacaagtgcacacacacaagatagttgattccagttactgcaacagagcgtgttctaggagcccacccactagccggttttggctcgctccatcacacctctgcagaaggctggcaagagctccttttagtttttcaaggaccatctgagtgaagcctcaggtaaaccatcttgcctcagaagtaagctgtgagagcccaagtatctgttcacgtcacccttttccgtgtttgaaaatgggtaaagcagaggccatggaagaatgggaaactagttgccctcttaactctaccagcattaaagcgtgaagaagaaagcctgctcggtcacgctgttttggaaaacccatctcccttccggtttccatcgctaatccggacccatgactctggttgctacagctagagaaagaaataggcagtgaagtgtaccaggcagagcaagaaatgccagctgcgttttaagcccctagaagctgagactgttcctggaggatttttctcctcggtttagcatggaaggaaagctggccttgcttgtgctcacttgtcacctgtcaggctcgcccactggccattgaaaggaaggtggactttaccattaaatgagaaggacagcagggaagtggggatgcttcattcagtattggggtgtttacgctggagttagggtgtttcttctgctcaagaaaagacaccagtctgcgttatagcaaggagacatgatcctccatgctccaaagattggacaataagtaaccaagtcaggtgtgtacatccacgtcatctcaaacctgctggcctgcactgcacgggctcctgggatgtgtcaaagggctcacagagaggagtagctcactgtggctcagtgaagatcataccagaaagatttctgtctcagtagtggctcctttagtccaacgctgtgtgcatgcaatgggatttaaaaataaaatccaaaccgctcccttgtgcatgtgtgtgtgcatgtgcgcgtgtgcgtgtgcctgcccatgtgccacacacagaaacagaagaggggcacactcattccaggacaggcgtgtcagcagctccaggtctccagagctctagaggatgggtgcgtgtggcatctcagggcctcctggccacaatcaggttgtccagtggctcctttgggcctcaggagagctgattaggttgaagataattggcattaacaaaacacttataaatggagttaactccctactagcagagagtaaacttagccttacatgtaagggcaggcacggaagaattgtttcaaatagtgtcaccatgtcaaggttgggaagaagggctactgagtgactgctgtttccagagtcagtaattctgctcagaaacccatcctggtactactgagctaggaaaatcccaacttcataacaacaaatacaaaatcagatgggaatcaagagttcatgatgcagtcccagcccttgggaggtagaggcaagaggatcacgactagttcaaggtcatctttggctacatagcaagctcaagggccagcctgggctacattagaccccagcatcactcagtggtagagtgtgtggttcgaatgcctgagaccctggattcacactccagcaaccctgttccccataaaaaccatgtaagggttacaattttcacagttcttcaaattcattttatttttacgtaattgggtataaaatgttgaataagctgttattgaatattgaaattctgaaatattgaaaatccagacaataagaaaggggaggaatggggtgtagcttctttccatgtctttggatgttttcttgcatccatttctcctgtcttgtgttgtcctagtttgctttctgctactgtgataaaactccatcatcaaatgctgcttggggcggggcagtgttattctgcttactcttgcagaggcagtgcccgaagcctagacttctcactggcgcattccccatggcttgctccccagggcttgcacatcttgcttgtttatacttccccccccctgccccccaggatcacgtgtcgtggtgaggcactgcccacaatggcctgagcacttacatcaatcattaatttaaaaaaaaaaagcttcatagatttgcctacaggccaatctgatggagacattttcttagttgaagtcttcttttcccagaagactcaagtttgtgttgagttgacagaaaacccctaagcagcacctgtgtttttcatagttccatgcagtcgaggcgctgtgaaggggaaatgggaaaagcagggtgggaggcagttgtgcattgttaatgtcctgccacaaacgttgatttttagaggcttcattatttgctggatgagttaatgtagtctggtctttgtttaactggctgctgtgtctgctcatgggattgtatatacaccctttcttctattacaaatacggagccaaaggtaagaccatgtttataaactcttgctagtgatggctcagcaggttccctggatgttttgccaactctgtctgctcccatccttctcttcgctggacattgccatttaaaactgtttttctttttctaaatagtaactgaaaggggatcagatatgggaaggttctcactgggattgttcaggggcagctcagctcccagacaagcagcatgagggtgtgtgtgtgtgtgtgtgtgtgtgtgtgtgtgtggcatgacaccctggagatagaaagactagcaacttctctcccctcctaccaaaccactcatccacccttgggtgtcacacatacacacacacacacacacacacacacacacacacacacacacatcactctgcctgtctgactggctcattaggtggctcatctctcttttcgtcctgaccgtctcagtgtacttccctctcggccactgtcccttccctactttctccacacttgggttgtaataactacccctcaggttccaacagatatctaaatccagcaatcatgagagccaactaggtccccatgtccagctctcagaatctgaggaagaaaatctagtcaactcaggggctgcctgtgtcctgcggccacctagacagtagagctatgcagagagtgggagacgttaggtcagggagaggctaggtgttaggggagaagtctgtcctggctccatggactggggcagctttgctccctgccctgccaggagaactcagggacacctggatccttagtcacctccacagagactgggatgcctcttgtttctaggtgaggatggttcgtttagtccttcccatctcccatgctccatacaaggcagggtctcctccctgtttttctccttttctaaaaccagactttaccctaggctaatgccctgcagttctcctggggtgctttggtctattattcttttcgctcaaagtgtggggtagaggaaaggggtgaataggaaatccttgacctggaaactgaagccaggctggggaatttggaacaaatattagggttggcagcgaggctgtgagtcagaagcaggtgctcggctgagagcatgccagactgaggccagggcagagctggtggctcactggatgagagagactaggggatgggggagaggctaccatgactgccaagcgctccccagccttcacttggagttagagaggatgcatttgaactcctgcgtctttatagaaacaaactccaaaagttcacagtgtcccctgaaaaaaatgttatgttcccccctcaccccccatcctggttacttagtgatgtgattccctgcttagggaattggtctctggttgagaaaaatcagggccccaggaggcagataaatttaaggtgtggcatgacaccctggagatagattgctggccagggcaagcctcactttggaacacctgagtttgaactctaccgagtagcacactgtgggctgtcatatcacagggggacttggttgtatctatggaacttctcataacatatagtagagcgtgtacaggtattgttttaccatcaatttaggttggttttaatgtcagtttgccacaaagtagaaccactgagtagagaacctcacctgcttgcattcattgattcagaaagtcccgcccttcccagtgtgggctgcacaggcttgtagcagattttaaaaggatttatcagaaagatctttcctctctatctcctgctagtctttccctctctccttcgtgcccttcttctttctctgagttaaccactgttaggcattttatcacaagaatgagaagagtaactaagacactcaggtctagaccctgctggcaaattgctgaacaaacacagaccttcaaacctagaagtttgaccttctgtgtgaatgttgtattttaaaatcccataatgctaattcatgtttcttctcatttccagataggctgaccttagacctatgtggtggtagtacagagccagagcccctgcagatgaaggtcccttgggaggttttcttttgggctctagcatgcactgtgcccgacacttttccctccagcttagagttcctgggaccagagagggtgtgagctctttcctgaagctgtggccagaatgccgccacttctgagcagctgaaccggaaggtgttttttccttctaaaagaggtctcacggcctcactgtttgaatacatttcaacagttactcaggtctgccttggcctgagcccatgaccacaagcaggcagacatctgtgagaaactgggctataaataaatggtttcaaacaattgattctcaaaagttggaattatatgcgcttgctctgtttgtcttgggctttggacagaagatgatgggacttcagagctcattaagttgtgtgtttactgactagtgaagggttggtctgtgcgaatctgtgtaaatgtgtgtctattttaacctaggtggtggtatttctgagaattagctgtaactccccgtaccccgccctaattgttggataacatcactgctaagcataaaacagatgcacaagtcagagatcagccagttgtctgcagagtgggaggatgattttaatatcgcttccgaattgggcttttagtcattctgtaagggttttaattgggcccctgatggcatgcaaatagacctgcagaatctaagcaggtgcccctcccaaggcagaagaaagtctttgacatcatggaaaccccagattgctccgtgtgactatctagctgcgtctcaagagaaggttggagggtctcgggatgactgtgttgcccagtgatttgtgtgggtgttctcgtgtgttggagttgccctgacctttggctgttgctgtttcgtctttgcttcccacagacccccggatgggatagatttattgggctttgtatggactgatgtaggccataggcttccgtgttgatttgaagtccattctcttttaagttaagcatgctctttcaaaataatgttggtgggatttttaaaaactttcttgaagctcccaaggaatgttagcaaggtgtactttctactttgggggtactgtgaattgtgttgccatgaatgctctggaataagtggccatgcttctgtgtgactgaggatgggtctgggagcaacaatgcaggatcatttgtcactccattttcaatagtttgatggaccgtcagattgctaagaaatacaattctatgagaatgtcagaaaggttcccatttttccatatcctccacaagacttgtttctggtcaattctaaaatatataagttatagtccctttacagggtggttacatattaagatgtaagacactatttcttggtgggcttcagttatattccttatggcagttgtactgagcattactttaggtgtcttgcagccatttttgtgtcttcgtagttatctcagtttttaaaagttgccctaatactgctgagttgtaaaccgctgagtttatattgatatattctggaaaccaggactttatcaagcacatgagctacagtttccccattctttggtttagattcatcttctgatgttattctttgaaaatttggtatctttaattttgatgaaatctaatttattacctccctatatgttgctagtacttaggtgtcctacagaagacagcttcacctcacctgtggtagtttgaataagcatttagatgcttagccattagggagtggcactatttgaaaatattaaaaagaattaggtgtggccttgttagagaaagagtgtcattgtgggtgagctttgaggtttcagaagcccctgccaagcttagagtctccggttatcgatcaatcagaaagtagccgtcagctactgctgcagagcctgcctgcaccccactgtgctccccatcatgatgatgatgatgaagctcccagttaaccgatctctttcataagagttgctttggccacagtgtcttcccggcaatagggacgaagacatcattcaggtcaggaactaacgtgctttacactttcacctcttggctttaagtctctggtccattttgagttaatttttcatatgacattatataaaattttaatttatttaaattaattaaataatttaatttaatttggcttcatccttatgcttgtagatttaacatcatccagctatcaattgttgaaatgtcttggtattttggttttttttacaaaaatgaattatcgctgaatatgcacatgtactctcttgtctctgccaagtgttcctctaagccaccaaaaagccaccatcaaagccaggcgtgatggcgcacgcctttaatcccagcactcaggaggcagaggcaggtggatttctgagttcgaggccagcctggtctacaaagtgagttccaggacagccagggctatacaaagaaaccctgtctcgaaaaaaaaaaaaaaaaacaaaaaaaaaaaaaaaagaaagaaaaaaaaaagccaccatgagatgtgagcctctgccttgtacttccacagctatgcataataacacacccctgttcttcataataaagaagtaacaggaccataaacatgatggcttgtcagtcttgctgatctatttatgcagtgttacgtcagcccatggtgctgcttccagcagctttgtagtgacttcagaatcagcattgtgagtcctttccatttgagaaggattgctttttgatgtgatattgatgcccgttcttccacaccacacgctttgaggctttcttctgtctctgtgagtcatattggaaaggttactttgaagtgatcatgaattcactttcagaacagatctcattattctattaatggtatggatttagatggagttggatatattctaaaagtttgacctttgagcccttaaccttcaagtcaaagtgcaaatcaaaggataatcctggcaactaaagagcacctagcatggtgcccagacatgccaggcacaaaccatgccttggctgcctcttccctccccttctcctaggtcagcctttcctgtacttgtacagtgactctgaattcttgcataagggtcagtcttttttcatggagaagttgatttctccgaggtcattgtttctgtcttggggaatctttttgttgttgttgtttttcgagacagggtgtctctgtatagccctggctgtcctggaactcactctgtagaccaggctggcctcgaactcagaaatccgcctgcctctgcctcccgagtgctgggattaaaggcgtgcgccaccacgcccggctctgtcttggggaatcttgaacatgccctgtgatgtagtgtcgatttgtcaacacctgtctggaactgagtatataagttacttctatcattcctgtcatgaaatgcttgacaaatgtcacttaaagaaagttttattttggttttattttggctcatggtttgaggggacagtccatcgagacagaggaggaatgatggcaggagcacgaggcagctcatgtcaggcatcacatctccagtcaggaagcagagagagatacgtgatagcacccctcttccctttcctttttatttagtctgggataaagaatggcgctcgctacccatgagggcaggtcttcccagctcagctaaatctctctggaaacacccagcttggcatgtccatgggtttgtctctgaaagtggctttaaatcctgctaagctgacactcaggattgattaaatatcacaccaagcttgacctatagcaagtgcccattcagtgcatgtttggtaagtgaatcccaggtgttgatcatactgtcttatctacttgcagaaatagaatgcttgcacctgttctaactaacgcctctatcatttgtatgaatatttaagtacaaggatcttttacacaagatttggtaagataattttccatatgacttaacatgtttagctttctcaagtggcataactttctgcaaatgatatatttatgacatccagatacttcctttttaagccaatttgagacaactagaaaggattggttctcagtaataaactctaaaatacagggggcagggggaagtgaatagggacaccgatgtgagagaggatggacgctcaagcagtgtggggccacagggaagcatgcccccgtctccaagtatagctgataaactttatgcaacagtcatggttttccttcattctctgtacctccgaagtctagacatgaaacaatgaacaaaggtcaccccagagttgttactggctgaggtgagcctgactcatgaccaaagaatggtgcctgtgctcactgagtctttacagccgtcactgggaaaccacctacctaaagagaccgagttgttttttggactcaggataattgcattcaagagctaaacagagctgtcaggctgaaggcatgttgagaaatgggtgctacctcaaagagtggattgtgttatcaaatagctcaggaatgagttcatcctaggtagcagtttgggttttgtgattattgttgtaattgcagtttctcctgtaggtttctgagagccttgagtgtgctaagatttagtttgcacagtgttttcaagaggataggtagaagcagcatccccaaagggtgccactggggtcttgtttactgactcaacccaaagcccttcagtactggtaattagcaggattatcccccttgcccaaacccatcagtcctgggggttagcagtttaaagaatcacgatgcagagtaagaactttgcttttgagtaaggagtcttgattcctcggctcttgtttttagactaggtcatttgtgatagtatattgtattgaagctgtgtctactgtttcactaagaatttaaattgggatttgcaaccaaactgatctaactctatgtataggtacataacacctgtaaaatactttaatttctgggctataaatacttgattttattttacttttgttttggttttgagacatggcatcactctgtagcctcgagtctggtgtcccctctattgcctagaatgggcatgcactcccagcaatcctcctgcttcctcctgagtgttgggattatggacacattccatgacacccaggtgtgctgtcggttttgggatgttacttgggtagcctgttctgtttggtgtctgtcaactgtcagtgtgatgcatttaaaagttagttttctgcagcatttgtcctgaaactcgtgacaactaaaggggacaaaaatatccaggggtagaattggatacatgaaaagcaaactgatgccttcttctgtggacaagaatatcacaggcaaccagtgatggtgtggacggcagagaaacttggtatgactggttgcatcctggagtcctaccaaagagaaaaccgtgtctagttcaagtgtagggacacacagactactctgtaagcttgagaactcctcttccttcccctactttaccccctccccccacacacacttccgacttctaatagaagttatttgcttaactagatgtggcggtttgaataggaatggcccctatagattcatgtgtgacagcttggcccataggaaatgtcactatgaggtgtggccttgctggagtaggtgtggccttgttggatgaagtgtgtcactgtggaggcaggctttgagcttcacatatgctcaagcttcaagaactctcagcttcactccagcaccatgtctgtttgcatgctgccatgcttcttgtcatgatgataatggactgaagctccgaaactgtaagcctcaattaaatgttatcctttataagagttgctatggtcatagtgtctcttcacagcagtagaaaccctaactaagacatacgatggccattattggttgtcaacttgattatatttgaaatggactacaatccagaaatggggggcagacctgtgatccagagcttgaggcaggaagacaacatgcctttgatctagttctgaaggctggaagacacaggctttatctgaaccttgagttaggaagacacctttaatctgggctgcttgccctcgtctttcaggcacatccattccttcgttggcattgaagcctacttcgggattccagctgaatacagaagaccagctgagatagtcagccttgtggggctgagcaactactaaattcttgaactttctgtccacggctagccattgttggattagttggactgtaacctataagtcattccaataaattacccatacatatacatatatggaaattacacacacacacatactccatgagttctgtgacttttgtttttattttattttattttattttatttttttgtcttttgagacagagtttctctgtgcagccctggctgtcctagaactcactcactctgtaagcctggctggcctcaactcagaaatccgcctgcctctgcctataatttttcagttttttgcttgttattttctttttatgtttatggatgttttaccagctagtatgcctgtgccatgtgtctctagacaccagaagagggcattgtataccccggcactggaattaaaacaccatataggttcagggaatcgaacccaggtcatctggaagaatagctagagctcttaatcgctgagctgtctcacctgaaacggagttctgtgacttttgagagccctgactaatatgatagaaaaaagttaagaggaggaaggaggtgagaagggagaagggaagggaggaaatggaaatgacaccaaccaggcatcttagtggtctggctgtctcacttccagtaaatctacccagtggaatggtgtgtcaccactgtgatgtgacagctttttggtcggcattcccagggcaggaaggtagggttcatactttcagtcagaagagtcaacccccaactgtgcttcttatcaacactcacctgaggtttctgcattgctgcatttgatggcaggccacagaagtgacactaggcagcctctctcctcttgtcacgtggcctgtaaggcttctctaagaactgagacacagtcagagggtgtgcaaatgcagagaccttcgatgcctctgggaacccgaggctggtaagtggagcaagagggagagggcagagggtttttcagagacgaggccacacaactccagaactaaaactttccattttagttttacttctgtgttatgtccttaagtttgaaagatcaatcagaagaaaaagtttaaagcagaaagtaaactactgccccaaatccaaaccagaaaatcctcacgtttttttatgttttctctacagtttggagagatgaccagagaaataaccctgtaaggctgggaaagtctgtattctaaagtgaaacattttttacttaacaaaggggaaagaatggctgatattctgtgaagtcatattttattattggactgccttcttctgggttcagaaaggatggaagccaactagctggtgggaggcaggatggcccgagtaccataggatggtgtccccaccatgttttctcctggttttttttgcttgctttttatttatttttttttaattaacactgtttaatgtctttctgatgtctgtggctctaatcgatgtgctgtcaaccactggactttttaaccatggcttattattttaataatttgatgtttggtggatttaattttttgaaacgccaggcatggtggtgcacgcctttaatcccagcactcaggaggcagaggcaggcggatttctgagttcgaggccagctggtctacaaagtgagttccaggacagccagagatacacagagaaagcctgtctccaaaaaccaaaaaaaaaaaaaaacccaaaaaacaaaaccaaaacaaacccaaacaaacaatttttgggtgtgttactccctgagtttgtttgtgaatttttcctttttcaggattgtcactgatgtttgtgtgtttagtagagggtggaacccacaggctgcttgctggtcaagtactcccacatcttcagacacaccagaagagggcatcggatcctgttacagatggttgtgagccaccatgtggttgcttgggagttgaactccaggacctctggaaaaacagtcagtgctcttaaccactgagccatatctcctgccccctgttgtccgtattttgaaagacaattttctactatcaaattgcctttcaaagacaatttatactgttaattatagggctcctgttttaaatggagaatttttttaagacagcatctcgtgttttccagggtggctttgatctgttttagtagccaagggtgactttgaacctctgatcctggtgtttctacttcctgccgagtgttagggttgcagccgtgcatcatcaagcctggtatagcctggaatatgtctgcagtgggtagaccgaacccaggacattgttcacgggagctaagccctttaccgactaagctagtggaatatggatggagcagtgtctaaaattgaattgtaaattagccatcaattatggataaatccaaatgttgggaaatgggctgttttcttggtgaatttctcctgtgtttgctgcatggaatgatggtgcctgttgcgcagctttatgaatgtccaggacaccgtgaagtgcctgggggttcttgaccagcttctctatgttgtgcagactcttgaccggccagggcgagtatttgttgccatctgaagataatggaaaagagtagtttcagctgcctacaaattggcagctggcaacattgtttcaactgactttttttttttttttgtcattatcttgttctggaagacagtctttcaccttgtatcaccagtgttaataatgagcagtgtttagagagagaattctgtgaagagggagaggcggtaagtgacttagactgttatgttctaaagctgtctgaaatgattttaaattacatgaggcatacatttagcttattgcgtaggtaggccctgaatgcagtgctccagtggatggccaaagtgtctccaggctccagtatctgcatcactgctcggtagccctgattggcacgtacggcttccccttccttgaccctttggtgttggctctgttcggatgattgcctctccagaaacttcctccttcccttggtttcagttgttctacccaggtgacgctatgaaactgctttccttgtggcccgctggcagcctctgctttcagggctcataaacccttcagggtatcctgggagggggtgggactagatcattacagtccaggatttacatggtgatcctagctaaggcctacatgtttacatgttttcaccaaaggctgaatgggcattttgactgtaattcacaatagatttgctctttacagttatttaaatgcatccatcacttagaacttttgcttcagccttctatttcccagtggctcttgtgtccttgctgggaaggacagaactggattctcttctttgttgtcccctaactgactgaccctgatgtcttagacattttctttaaggctcagttgccagttgagatgtgctcacaacctgaaggtatcactgtgtaacgcacgagggatgctgagatctaggctttggtagacatctaaggggcttgttttccataccctcattgtacctacttatcttgaatttcaaggccacactcatggtctgtcaatcactatcatcacgcgctcactttgatcagccaacaggtccatgttctagactgtgtctgcttcacctaagggacttgtagtcggccaaggtgaggcctgtggttgatggccaaggagctctcttctgagtttgcccccaaaggccggaataggatgctcctggtagaatgagcctgatggtctgtagggaggagagtggttgcccacttaactctgagcaatatggtcccatactctcacaaggtctgcttcctggcctagaggcctgacagggacgcaggttagttagtgttgtggaacaaacatcccgaagctttgtcaaagctaactttaatgttctatgtgggagtcagtaagacctagaagtgcaaccatcaacacatgtagaggtcagggtggcctctggcatgactagggaacagaggcgagatttcagggtgctacagttggattgtgaaacctccctcacaggcttatgtatacagttagtccctagccaatgtcaccacttgggaaagttgtggaacttttaggaggtggggcctagctgaaataggtcaattgggcttgggccataagagttatagccgatcctgacttcctctttgctgctctctactgagctgagtctctgagatgtgagcagacaggcagcctcagactcccaccaccatggacccagccactttagcttccgtgctttccccggcttcgatgagctgtactctcaaactgtaagtcagaataaatccttccgtctctaagtcgcttcctgttaggtgtttagcttagcaataggaaaggaacacttctaggagtctattagggacagatgaatctgagtgtatatatcttttgaaaggaagctcatgtgtattttccgagcctggagatctggtaagctctggctggtgggtggtaacagtcagtatataaagcttgttttaaggtcatacttgacagttcattatcagctgctaagaaaacaaggctctttttttgaagaccaatttcattacatagcccaggctggtctcagcattccgattgctgggattataggcacgcaccaacatgactagtaaaaacttggtcttcagataaagcctagtgtggtggtatatacctgtaacttaatatgtgggaggcagaaggattgttggttcaaggctagcctgggttaggtacatgagactctaccttaagcaaaacatacccccagtttgttgggttgggttagggaagcagggcagttcctgcaacagttgttggtaactcatttgatccatggcccgttactattttagatgggtgtgtgcattcagtccccataggttggcaagctacaagagtgaccaaatgtacttagcccccagttctacagatggcaggatgctgagaagggctgcgttctgccctgttcagtgccagctggtcacgggtaggctaggggctgtaatcatttgaagacttgtttgttcatacatgttcatgtgtatgtgctgacatgtgatgctggcatcagctgggcttgtttctgttgtcagatgccttcccttgggttgccttcatattggctaccctgaacatggttgctggaatcagaagcgtgccccatggtctcatgtgttgactgcttgttccttaacttgtggtgttactatgaagttcctttaggagttgcagcctggaagtaactagatctggaaagtaggcctttgagtgtgaagcagttcacttcctgtccttcctgctctctgtgttacaggtggtagcttctgccgctgttcttttcccactatgataagttgaaatcttacagagatcatggacccatatcagtgctgtacccgttcagtccccccaccctacagtagcctaactgcagatattgagtaacaaagagtgaacaaaactaatacagtaaccaagttgaagggtgagcggcttggtctgagatggcagctgtatggccaccattcctaacattgtcctggaagtcaccggtaatactcctacttttctggagcatgaggagcagggggacattttatgagtgaggtgacatttccccgacttcatcagcacggggaggcagaagaattgtagggtcaaggccagcctggattacataatgaggatatctcaaacaaaacaaaaccacagtgtgttttggatgccaaccgaacaactcaccagctaccaagccctggtatcggttatagacatttaagacaaagcaaaaagggagtcagagagtctgcgtcctgcagaagtcctgcatactttaccgcagtggacagagtgagtaacaatggcatacatagcctaccctggaaacagaggtgcttttagagttttcttaactttttggcttttagctcccaaaatccaccccaggattttcttttgctttgttctgtcttttccttctgtttctacttccattcccttctttttccagcttgaacactttaaaagcgactcctgttcatttcttcacagccatccttctgtgaagtgtaaatcttgctatgtggacttttttttttctctttttgccacctacattcaggaaagttgtgcttccctcacgaggtattgcctattattgccccggtgatatgggaacaatgcatccacagtacgactcaggagctctgtttgacagagcttgcttcgagcttaagtctcagttagatggctgacaaacttgaggtgtgtatatctgatacacgactcgctggagtgtttagtttcttgtctgagcgcttggttaatgtatttatagagggttagtcatggagggttttttcccctttaacatttcaaaaatgataagtacattttttattggagatggagaagtttttaaagatgcattagcattttgcagagtgactcggttgatagtcttttaagttaaaatgccgcgtgcagtggccaattgttaaaactctatcctgtgtctcccaagctttcatcagttaagggagggtaatgccacccacgggtagagttcaaaccaccaggtgctattttaggttcttgggtggtgctgtctctccgtacccttcagactgctaagtcacatcctgctctgcattttaatctgctataaattagatgccacagcataggtctggcgttcggtgcacaagtgaaattaaacaccccatgaagagaagggaactctgcgtgtaagcctatctggctttgtggaagaccacgtgaatctatagcccaaccccctgaaaccccagaaacagctagggagtctgtcaagttccttagtatcaagtagagtcaggctcgggggttttgtagcttaccatggtgactctgttctgaagccaagattgagaaatgtcacaggaagtggacttcttccagctccattctttgcagggcacttttttttttttttttttttttttttactgtttagctaggcgccgccccatcttctagactccacccagcacacctgccagcagccccgtgtcctgtctgcttccttttactcacatgctgctcattttcttccttatgagctagagttacttagtttcctttgcccgggctgagaccagcgccctgcacagagcctgtgctttccagatgcacaataatggaagttcctccatgtagttgctttttttttagctttcagtctttcactgtggcacccattattattccatgttgcctcataagtttcttttttttgtttgtttgtttgtttatgtgtgttatatatctgtgtgtgtgcaggtgcatgtaaaaagcagaggtctgtgttgagcatcttccttaagcactccacatcactatcttgagacagtctctcactaaacttggagttcacaagactcagagatctttctgtctgccttctcaatgctaggcttacagatgtgtactgctatgtctaattctcaacatgggcactggggactaagctaagccatattcctgccaggtaaacactttacctgctttggtatccaccccccacatctttgtttttgttttttgaggtagtctcgctgggaagcccagcatggcttcagactagctttcctgggataccttccagtgggctgagcttacaagctgtgccatcccacccagcttcataaatgtttcttttgagatacagagaaataagtaataataaccaacaaaacaaaacaaaacaaaacaaaacaaaaaataaaacggcaggaggaagaggaggttgggccgcacttgactttccatgcaggtgctagacttacttccattcagcccaggaactctgattctccaacaagaatatttagtcaccctgatctgttctggctcttggaaccatgtgggtgatcatgcagcaaggagagtgctagtttgttggagaaaacatctcactggaagaatggctctccactgttgactgagaattggatctcccctgtcagccctattcagaaaatatgggattatttaaggcaagcatgatacctacctggaacttgaaaaccctcctcatttaaacaaggaggaagatttttatccccaggacatcctgtttctgtcctagaagccaatcagggaagaagtggctggcacttccaactgaggggcacagaaataatccaagaaacctagttttaaggaaactttttgtctttataggactgacatcatttatgctaaatccataagactcaaaacataagtgactttattaataggcttgaattctgtttttctttttcttttttttaaagatttatttatttattatatgtaagtacactatagctgtcctcagatactccagaagagggcatcagatttcgttacggatggttgtgagccaccatgtggttgctgggacttgaactcagaaccttcagaagagcagttggcgctcttaaccactgagccatctcgccatcccctgtttttcttttattaactgtccagatacagttacttctatgctgggatggtgaccagaagtcatggctctcatttctaggcctagttctgtgtcctggttggaatctgatggaccagaggcacagaatgatgtttctaccatcaggacagagtagactgtggaatggaagctgctctggaggctgtgcggtccgtatggtttgaattatggcagttagaattgcagggccagcatgcttgccgagagatttgctaacctgatcaagagagttgagcggaagattggtaagaaggaatagaagaacattaaaatgtgattgagtggagaacaggagtatgagaaagtttaggagggggctgcagatgtcctgagactcagcaggaccagggctgtgcatccctaggcagatggagatggagctttgtcagatgccaagcaccttgctagaaggagggttgatggctcatttccccctgcaggctttattctccccccaccccccaataaactcttaacttctccctttagttgctgtccttagaaacctgagaaaataacgcaggggctgcctccttgtgtttccttcaagcacaataaagaagccttggccagagacataaagtggcagggagagatgacaaactaaagaagtatgctttagacatggctgagggctctacaggcatttcagagaagtctgtgaatggcacgcatgaaaaggaagacatgcccacaaggtttctgagcctgtcccaaatggaacaggaagtgaggcgtgtgcctgtgggaagacatgtgctcctaataactcttgctaccaatctttggacatggcttttctacagagtgcagagccggataaaatgccgcctgtaagtgggatgcatcccagcctccagccgtcaggatgcagagaatgactccagctacaggaaacatgactaatactttcatagtccaaaagtaaagctggagtccaaaagggaaacaaagctgtttggggatggggagaggtggaggaaaggctttatggagaaggcactgtctaaaatggtttgaggaggatggaggacatttctgcagatggggaagaaaaagcgggtgaggaggggttccatgaagacagatgaatgaggataaaggcgtgccactgtgggagggtggagtaccctgagcttttatgagtgtgatattttggagatggaggttgagtagtagcagctaaaatattggcatttcaaaatttcctgtcatcaacatctgttgtcaggtgagaaaaccacccatttagtaatgtgcatcaagtggcagagagctggagtccaaggacctccgtaaacggtatcggtatcgtggcaagtgtcacacgccggctttgcgatgtctacttaccctctgcagcttggggatgaggagcaggagggaaagcctgggccgtgacgaggtcatgggactatgagatgagtaaggaagtaagcaaggagagaaacaggatccgtggttttgagaataaaagaatataaagccagtcggaggtgatgagcatagaggaagccactcttggtatttgggaatctgggaggagtctgtttggatgagggctgtgtggttggttgggaaatcagaaccaggtgtcagcttgaccgccaagagagttactaggagctttgatgttggagggatcagtcccgggcctcagcaggctgtggggaggggaaagagctgggtgtgagctgccttactgaaactctgggcacaggtaagatcgccgagagtggagtcgtctaggaagaatacatgagggcagaaccttcatagatgcctctggtagcgcttgtacttcccatgagcatgcgcaggacagctaaggcgtggaaacaccctaaggcccggggacccgtgaatgcatcaagaacccagtgccagcatgtggcctgtcatacaaccagaacaatcctattgcagacaaaagcatggatcatgtgttaagtgaaattggccagttgcagaaagaggaacactgggcagcctcacttatgtaagctgtctgaaatagtcacacgcagagacgcagcgatgggaggagggagagaacaggatgttgctgggctggttacagggttgtgtttctgcaaggtaagctctggagatctggtgagcaacctcctgcctgtagataagaagcctgcgcggtacacccgaagtctgctaacttcacattaagtactcagcccacaataaaagtaaacacacagaacccattagatgctgtacctacagatataggtttaagaggaagcagaaaacattctccagcacatgacctgggaaggccccagggtggttgcacaagcatgctagagtcatgtctgcagagctaaggtttgcagtgagctgggctcgtgagagaagctggaaagcccgaagactataaggctggagccccagacccagagcaaaagctgctgggtttggttcttttttttcttcctcttcacaaaacagcaaatcaggttgttccatctttttctaaggagagctaactggacaggacaggctgaacatggggacatcactccttatggtgaggcagccggagacaggtgccccgctgagtcaagcgacccagggtggtttggccccagcacacagcagaagacgtgttccctcagtcttcttgggagttgggtggagaaactgttgggtataatgattgagattggtacgaggtacccagagtggatggcctctgggaagactgttaaagggactatctgaaaagctctagactaatacgcaaccctggttgcacaccttgatctccagaccagaatttacgagaagatacttctatctcagcttcattctggagttacggctgatgtggttcaggctcccacagacaatgaccggcatacaggggtggatcctaactctgcacagggttctgtccacccactctgaaatgctggaatgactatcgtccagcagagcaacagctcacgcttaggaaaggaaacagtttgggttctgcttaagatgtgcacagtcactctagagtcctttcgtggctatgtgactagatcatcagaatacctcagtgcaacattcttcttcaaacttaaacctgagggttggaggaggagacctgtctcagaaccaggaagaaaagatttcttaataccatagaggtaattggtgtgatggcttgaataagaatggccctcataggctactatatttgaatgcttagtcatcagggagtggcactatttgagaaggactagaaggtgtggctttgttggagaggaagtgtgcctttgaggtggtttgtctttttgttttttgttttctggttttttgtttttttgtttttttgtgtttgtttgttttgaggtaaccaccctggctcatctgtgttttggttttctagggagtggcacaccaaatcttgcctcatgatttatagagtaggaacagggattagaaacatgtggagttgatattcgccacccactggttaaggaatggatacagccagccccaatgtgccttggaatggtggtgagggtctcctccaacctcccaagaaataaataccagagacgttggatcctatgctgaggataaaatattaatctgtccaagtggtgcctcaacgtgtgcctcagaatcaccgggaggacaggttataaccggcccctgagctctgccctcttttgagattctgtaatctgtgttggagtctggtactatcaatttcaaacaagttccagcaccacgactggaggccactgtataagggacaactaccacatccacgctcagggcctctgcatggctacgccagggctgtcagaggaaaggattcctgcatccactcgcgaggactccacaggattgggatgggccactggaggtatcttgattgcattggcctacaaaagccgtaatgataaatgcctcaggaggcatgtgggaccaggagtccagttgctgattcagggatctctgagatgctgacatgaggacggatccatgaaagacactcaggtgttcccacgtcacttagtgacccttggatgaaaaaaaaaactttatctaactcaaggaacatgctgatctgaacaaaatgtaatagcttccctgtcatacacagaatggtcatttatatccattcttcttttactgtggctttttccagtaaagtgcaccaagcttagagtacatatagaactgtattttggcaaatatggaactaccacctggcttgaggaacagaacttctgcaattcccagcagcccctgcggctgatcctcctgtaaagggaagtgctgaaaaatctcttctaattcttgtggtgtgctggaggggcctcacaggttctgtgtatcaacctattacaagtgtttgatctatgacagaattcagtgtaaggcctgctttcaagtcagcgttatcaccaagaaggcggggacccattgactcgccccttcttctaaatcatgtagcctgcacatccaaagtgcaacgccaaatactgaggccaaggcgaagttaccccaccaggcctcagagctggcctagcactgttcagcttctttagaaagctctcagatcaagctggtggaaaaccagttgtatctacaagtctagtgagcataatttatgcaaacacatgccatttgggggcttctactaaggaaaagagaatagagttctaccaaaattggggggagggaggctggcgagatggctcttcaattaagagcatttgctgctcttgcagaggacctggctttgatttcccagagggtatctcataattccctcagtaataacctgtaactccagttcccgaggctgccacaccctcctctgatttcagtatgagagtgcttggcccatacaggatacacagctatacattcaggcaaaatgttcacgcacaaataaataaataaataaatcttctgggggaaaaaatgtcttaaataggtaagaataacaacctaagatgagcctaagaaacaaacaaacaaaaaaaaaacccttcacattcagttatctgggaaagaagatggagatgttatctgggaatgaatagagggaggtatgtatgcacaacacagcgtgcacaggccttggagagatccaggcctggtttgaactgatgctgtcctacttcaagctgtagctttaaaaaaaaaaatcacagttactgtttcttgttttggtggagggtgtttcctatgcaaacaggaactagcactatctcagtactcaatactcagtacctctcaggatgccatgggactgagttcagaaaatggggttaaggtgtttggtttgggtagacgagacaaagctgagccccaacccctcctttcctggcttctgaagcccaagactgctacgcctcttacaactcaaagaaactaaagacctttttccacagttaccatttccccaaatgcacacaccattgaggacagactatttgtagaaatagttaaagcaatgttcttcctctagaagaagaccgaaaataaagcccttacgagtacaaatgtggaactctcataatctctttgtgcttctcctaccaaaagacaagattcaggtgtgttccagagagactctaaggctacagttacctccctgccttgagcacactaaagctgtgtttatttctttgtatgctcgtttatttctttttttttaaaaaaaaacttatttatttttatatgtgtacactgtagctgtctttagacacaccagaagaagttatggggtcccgttacagatggttgtgagccaccatatggttgctgggaattgaactcaggacttctggaagagtagtcagtgctcttaaccgctgagccatctctccagccctgcttgtttatttcttaaaacagtgtccctgtatatagcccaggctgtcctgaaactctcaatcctcttgcctctgcctctaagtgtaggattctaggcttgtgccactataatcagctattccaattatgaattaggctttgggccttgactttgcgatcattactctctggctctgttgtctttacaaggatgggcaagtcatagaagatgctgagaagctgggctcatttctcctgaacaagacttgtttccctcctttaaccgacaccggggatgtgacgattttcttatggtcagtgctgttaagttctattgtgtgaatgcaggcctgcatttggataactttgagtcatggccattgtgtaacgcattcccagggtggtttgtgtgagcactgtttgagacatgtatccaatatcctcgctcttcttctccttttcctctagacccatacttccatctctggttgggaaatggcagacattcctgtgttctccttgactctataagactcgaggcattgctcctttattctttgctctgagaattaaacacatcttcttcctgtgaactccatttgtcttttagagggcagcaaatcctggggaacaaaatagcagtaatttagcattactaaagcagtatattcatattcccagactgcttcactaatgcttatggggggaaatcagggggtgggggagggggaaagatgggtgtggtggatgctaaccctaagtgccaattcaatggttttagcccacaaagagcctaccaattagctccctccaaactgagattgtgagtcagaagataaaagccaccccttccatcagttgcctgggttggggtctgggctcctttggcagggttttataattcccatgagtcattttattacccaaggtcctgtccctcccccatatttcacacacacctttcctcccatgctctcctttatcagaaccacttgcttagaaaaacaaaacctgccacacatgacagaaatcctttgttagtattcttagtccactgtggacatgttgccatagtgatggctgtatacacacacacacacacacacacacacacacacacatttgctcagttattgagggtaccattggtttcttctccccccaccctcccttctcagacaacagtcaacactgttaactaaacaaactattagtgtctttgcagcttttcttggcacttttagctagtttaatttgcttctaattcagctatacttagtcaggccctgtaagcagagctaactttttataaagagccagtcttgtttgttttcaggcttattcattgttagagccaacttgtaatgattccagggatggagagctggagtaacgtggtgtgctagtttcttttctgttgctatgataaaatacctcgaccaagtcagcttatagatggcaagctttttatgggcttatggttccagagggatgagtctatgatgggggagtgtaggcatggctgaaggaaccggaagctgagggttcacgtcttcaaccgcaagcacaaaggggagagagggtggggggagagggagagagagagagagagagagagagagagagagagaaagagagaaagagagagagagaaacagcaaggagagtgaggtttgaagctctttaagcccacacccagtgacataagcccttcagtaagaccacacctcctaagcctccaaaaccagggccaccaagtgttcacatgcatgagcctggcaggagctggtgagcagggaggaagggggtggggggtctccaagctatcactcatggaactcgacttctatggcttatagatcccttaatttgttttctgagacttggatagttcactacattgctttgattttagcgtacaatataatcatttttagagagcaaaatgcctaaaagacattataaaagacttgagcatttaataattaatcccatttgatatcctatctgattagttggtttcagggcaatcatataagcgttcttctttaaaaattaaaccatgtgaacactctgagggggttgcaggatcaattgaatttagtgtgtttaataaggccttggccttctgcaccccaagccaggccatccattgcccttaacccaagactggggatgaagatggggcttcctgggatttctcctctatgcagtgtgaggggctgtttctccgtgtaagacttgctttagctacagaaatggcagttgacagcctcaatagctacttggacacggggtggggtggggtggggtggggtggggtgggggaggggttactgtctagaccctagtcagtgttttttcccactgtacatactctgcacctggcgtctgatacgtcagaggtggtgtaatggctcttactgctgcacctggccatggtgggggtggcacacctatttccagttccatgcttaaagggctaagatagtgcctccgtctcgctatctgtgtgatctggctagagacctaacttactagaagctctctggtcttctctgtaaaacagagataatatcctcccatcagactgttaaagaatgagactgtttgtgggaatccttttggcaatcgctgttgtagtatttggcagagtatcgtgcaccctacccatggatcactgttttgattactattgtgctaccagatgtgggagaatctgttacccccacccccacccccaccccctctccagtttttgttatgtcgcattatagatgcctttagaaggaattaaaaactttcttagggtaagaaacacactgctgttctctaaaaacaaaacaaaacaacaaaaagagcaaaaccccccaaagaattaaaaaatcattaggattccgttgacctcatctttcggtcattccaactgtgcattttagtgacatttagcagttttacagtgttgtacaaccgtcatcactctctagttccaaaacacttttatcacccccctaagggacctataactgtttaagcagttacatccagtctctccctgaccctagcccctggcagccacaaagtgacctcctgactctgtggtttgctgactctgtacatgccatagtcacagaatgttatcatatggccttttctgtttggcttctttcacttagcatggtgtctgcagtgttcctccatgttgtatcgtctgtgagtcctttgttctattcaacagctggataatattctctcactggttattttagatgtagtctacacactcatcaattcagggtccttcctttggctattacaaatactgctgatatgagcaataatctggaaattttcctttgaacactgattttcaattttttcagaaataaaattgtatattgtatgataattttgtgcttatattttttgagaaactgtcaaactcctctctgccatgggtgtgcattttatgttcataccagctatggtttctactttcttcatatccttcacagtgccagttgctgctgctgctactgcttctccttttcctccttctccatttcttcttcctattattattattagtagtagtagtattgtagcgataataataatataaaatagtgtctccctgtggtttgggaatgctttgtggtactagttttataaatctatgttttcaaattagcatattaatgttcttaaacctgtcacatttcaaagctatctgaaaaaaacacatgtacagaatttcttataggaggcaatgtgaagtgtctttggaccactggagtctgtaatatgtgacatggcttcgccactgtgtagctaagaagaggtgatgtctgccctctgtaattctctaacttctctaattattattaatttttttttttttttagagatttcctctgagacttccagaatggcttctaaacacattgggtaagagctggcacctgcctgcgaggacttcatactctcagctccaccatcttcccatggcattttgactgcgctgagcccaaaggaccagctcttcacaatgagtgacgagaagaatctcggtgtgtctcaaaagttggtttcaccttcaagaagcacaagtagttgctcctccaagcaaggaagccggcaggtaaggtttgactgctgtggctcttatttgtaggtacagatgtgtgttcactgggagatgccacctttcagtttaagagcaagcccttgtcttcatacctggttacgtgaggagaatcagttcaggttcctcccaggggccgagaatgcatttggctctttgtgttgttttgctcagcccttgcaactgtttaccaacatagacactaacattcccattttccctccaaggaaactcagtcatgcaggccagattacgtgccccagtgaggaccagatgccaaataagagctccatctcttctgctctagagcccacctttttctttttaaagatttttttaaaatttctattttctgtttatgggtgttttgcctgcacgaatgtctgtgcaacacatgtgtgtagtgctctcggaagataacaggtgacatcagttcccctggaattatcatagctggatatcaaattccattccacgatgccgggaactcgaactgaggtcctccgcaagagtgataaatgttcttaactttggaggcatctctccagcccctcccacttttccttataccctgttaaccaaaatagcagttatcactttcccagtaattacattactacctccttccattcaccagtattttgatgaaagcctgtacctccagattgtctgtgagtggctaaagtctcacttgctagtttttccctaatgggatgaggggagccagtaaacctgggaaagtgatgaagaaaacagtaaaacagaggagagaatcctaaagccccaagtgactgtctgtggtcactggttgccacttggtttcctttccaatatggcgttgttgacagatctgctggcgtccatcggtaaccataagggtgtattaatcactggaatccatccttgcttcaccaaggcgatggatgggaggtatgcaagaaagctggatttccaacctgagaggcctttgaactgttcagtatttactggctctgtgggcattgcttttgccctatgagaagtctggccaaagactttgctttttgtccagggctggaagcaataattaagcagtggcctacttcgggaacactgaataatagtgactcagctaagcatatcttagtttgaacatttgtctcagtcagggggctagctactcacccacaagtccatgcttttgggcaaattaaagtttgctgtgagcttagagtgtagggagccctttaagatctgtttggtttttgttttttgtcttttcttctcatttgtctttgtgtgtatgtgtgcatgtgtccatgcctgtgaatatggctgcacctgtgccgtgatgtacgtgtagagactggaagacaatctcagctatggatcttcaccttccaccttgagacagtctcttccttgttttctgctgcttacaccagtctggctggcccagggactctcttatctctgcctctcatctagtaagaatgttgacatttcagatgcttggcctgtgacctctctgcaatgaactgagattgtcatgtttgtgtggtgtgttggctagtgtttgttgttttgttttgtcttctgttatcaggctgacacaaactcccgtcatctgaaaaggtgggacctcagttgagaagttgtctccatgacattgccctgtgagcaagtctatagggggaattttcttgattagtgctcgttgtaggagagaccagcccactgcaggcagtgctacccctaggctctaccaccctttagttgaataagaaagcaaaccaagtccactgtagggagcaagtccgtaagcagcattcctccatagtttctgtttgagttcctgcctccaggttcctgccttggcttccctcagtgatggactataactaggttgtgaaagccaaataaactctttcgtttccaagttgctttggtttggtctttcttataacaaagaaagcaaactagaacatgggataagcacttttactcactgacctaactaccctgcctctgggtttgtttttgtttttaagtttgtcactgcctaatgctaacaccatgggtccctagagatctgctctcatgggagtgagtgtgcctgcccacttgggcagctgccaccaggctttcggcttcctacttcttcagccagcactcaggtttggaccggagcagagtatgtcatttgcccccctccccaccctcacaccccaactccatcaacttgcgacaagcagcacctcttcttctgcccacgtttgcttcacagggaggctgagctcagtgaagtagcaagtcctcccggaggagccatgtcttccatcctcagggctgtggtaactcttccagtgcgttcattgatgttggttgatttggttttcacaatgcaactttcactctgagtttccataaaaataccaagaggaactcacaccacccagtgcttcaatttttcttttttgacatttatcaaatggtagtcttttctatttaagaccgtccactttaatttgcataaccagtgtgcgcgcgcgcgcacacacacacacacacacacacacacacacacacacacacacacagttgctttatgtgctggtcaggtttctgtcagcagaaacaccacaaacaatcacctgggagaaaggaacttccatacagaactgccgctatcagattcacctgtaggcatgtctgggggacatttattgattgttggttgatgaggaggggccggcccactgtgggcagtgccacccctacacgggtggtcctggatggtgtaagaaagaaagctgatcaagctatggggagcaaaccagtcaacggtattcttcaggtttctgtttatggttcctctctggacttccttctgtaacgagggcatataaaaccggtaaaccatttctttcccaagttgcttttggtgctgatcacagcaaagaaagcaaactagaatactgtattagtgtaaataaatgtttgtatttcctctgtggcactggacggggctctgctggcatttcaggggccatggaggctctcctttgctggcactcaggagctgtagaagctctcctttgctgtccttttgggggctcagccacttccactgcatctgtcagctgctaaataaagcaaagcagcactttgccagcctcgtcacaggatgctcagaatggcaaggtttccacagccacaggctgcactgcagacatggtaaaacagcaactgtcaatgacacgtgcagccacctcctggctttggaggtgccactgtgagacccctttttggtctgttttccttttatctggagtgggtttgtcccatgtgcacgtcactgactgttatctgtggtgctagttttccttgcgtgctctggactgtggtcagagcctcatcttgcatgtctcctgtgagatctctagtcacttgtcttggtttgggataggccttctgctcccagggactctgatccagggcaagtctcacattgcattggggactccttttccatggtgagaatggaatgtcccagatcctcatcagaccagcagataacctggcccaggtttagccgccctcttccactgccccgatgagcagatggcaaagcctccgttcactgtactgtgggcagtgcaccatcccagtttgtggcagtgagcctggctcaggtggaggccgttttagctcccacaggtcacagaagtaagccaacgatcacgtttgcccacggtgtgtttactttctttcagatccatgaagactttcagacttttacaaacataatctttttcccctttagctttattgaggtgtgactgacaaatgaaaattatacatatttatagtgtatactatgctgttttgatatttgcatatggtgtaaatgataaacagagtccagataactaaagtaccgattatcctaaatagtcatagcaggtgtgtggctagcaggaacatttaagatttgatctcctggactcggatgttcagtctctagactgttcaaggacctgggctcaacccccagaagctacataaagctggctgtggtgacagacacttgtgaacccagtgctgggaagggtagagacagacagatttctagggttcactggccggcctagcctaatggttgagctctaagctgatgagagaccctgtctcaaaaataaggtcccagctcctgaagtatagtatccaaggttgttgggaacaaaaaagggggccctgaggaagaggggggaggaaaaacccacaccccgccagagttttacctattcactggtctgtcaggtgtggaagagctgccatacactttccactcagccctgggtgggcacttaagcctctgacccattcttcagggggtggccaaggggcagccctacctgggatccccggagctactttgctaaagccaccagggttataggagagagggatgaggaaagagaggttcccaacaccggccagagtgagggcacggatcttgactggagcacaggaaggccttctaaagggagataagaaacggctcattaggagaaagcctgttccatcctccaagcgcagtgggccttgatgagcagagacattctatggttttagagctttattatagaaatgcagagaaaaggggagaaggtagaagagagagagggagggagagagagagagaggagaaaagctagagagtaagagggagagaggagaggagaagacaaagagaaagaaaagaggagagagaagtgagaggtaagagaacaaaggagtgagagggagacaagtaagagagcaagcaggggctgaacagccctttttatggtctttactgttgcttggtaattggggaggagtttagcctgaaggtcagaagcttgggccattgcctacgtgattactgaccatgcttctcttgtggggactgtggggggcggtaacttaggcaggagccagagttccaggagcataaaggagcataagcctactgtgtcatgtaggtgacttataacttcagggttcagacctcaactcaactggagatcagcctgtctgtgcatagcccaatgccccacacaaggttgtcctctggcctcacctgcacacatgggaacattgccctctggcctcacctgcacacataggtacatgcgcacacatggagacttactgtccctacaagtgtcacaactagttttcctgtggtattcacaaaagtatccgttccaggagccccactgataacagagttcaagaatgcacaggccctttgtgtgaaatgtgagaccaccgccctgtgttcttctagtggtctagattcctgatagaaatagtgtgttatcagccgctatgctagattcagggcctggtgatgagaggaaatgtctctacatgcttgggcactctttctcttggaatactctcagggtgtggttagccgactccgcagatggcagaggccacaggtggccagtgcagtattctcacccgctgaccccatgtcacaccttagatcttcagaattgcttccctctgaggagctggaactttgagcttcggatctatgccctcgtgtcctctaatctacaagtgtgccgtgccttctgcttctgtgggttcatgtcctcacgcggcttgtgaacttgagacagtgcacagtgtgctttcctgtgctttgtatcatgccctccagtttccccatgtctcagatgtaaagatggcatccttttaaaaggcagaattgtatttctttctgaagaaaagatattatgtatgtctatatgagaaacagtggcatgtgtgtgctaaatgtatatgcatactacattttcttttcagacttctttttttactccatgaatataagacagcctagaagtgcatagctttacacattgttattatgcttggagtctgcgtagcaccaggaagaagacactaagagcttgaatttaaatgccatagataccacacacacacacacacacacacacacacacacacacacagagcacattttgcacagatcacacatactgtactcatcacacacaaacataccacactcacatacatcatacatgtgatattttaaaataagaataatgccctcttgctcatgggactcagtctctctaaaaacctttctcttaggttctcatccggcacagacagctggtgatccgagtctctgtaccttggactttctgtttgttaaacttctttgcttgtctttgatacttgtattgacttgaacctacctttcctatatacatgtgtgtaatgtctgggactcatgcacttccttgtagatcccccctcccctgcatgtatctctcacttctgtgtagatttccccgtgcatgtattatgcagttctatgtagatactcccctgttcatgtatcagcgttaaaggaacttatttcttgaaggagaaagtgagaactaagtgagatagtacagaacgtgcctgggctggcacgtgagggatgctcagagcatgaggatgaagttaatgagtgactaggcatgcggttgctaggtaggaagatacctagcagactgttccctgccttcatgaggtaggtgaaggggcatataagtaggagagagatttgctatttttaaacttataaaataggagtaattataatttccctttgtcttttccccctgcccccttctgttcctgcctagaaatgtcaaagtattgcattttagaagggagatggggctacgcaaatgaatgggtgtggcttgtagtagagcccagtagctaaggtgtattttggttttggttggctttgggttttgtattttttttcaactacttctattgagaggctactcctggacgtgcttgagcaggagatgtaaaactgtggaggacagaggagccagagggagcgtcacagataagaaaccagctgatgcaaagctcctggctggagcgaggccacagctcccaggctttaatgagatgttagcatttggcatgaaaaccgagagatgagacagtaagttctgctaacccagttctgaagcatgctcccacctcagcctggggcttgaaagggagagatgtgttcctgagtgagtctccccatggtgactcagcttgctcctgtcccccactgtccctgggctaatctttggtggcatttgagcatcctccaggtcacccaatgagagttaatttatgcagccattcactgatgcttcacttcagaaaccacaacaagtctggtacagtgccagaatctatagaacagctaggttgactgggagagaatttaccaagctttgcatgaggaagtaaaggttgaggtgttgacattttcatttgagtattgatcatgctaagatccaagccaggtgtcgtagcgcatgcctataatcacactacttgagagactgagggaggaggatagcacgtttgatacaagcctgggcccaagactgtcaaggagagggaagaagaggaggtgaaggcagtcatattgatttatttaatatagtggcactgagttagatgaggttccttattaaagcgtggagtagccacagtgcaggtcatgggaagaactcgggtgctccagggagagtacgtcttccccgctatgcaacgcttggctcactcccgagatgcttgagctgcagccttgagctgagccggctctttggctcctgctcatggaagagaaaatctactccagtgatttgatgattccaaaatgctaatggcagtcaagatagctcagccactaaaagcggttgccacacagggctgacagcctgtgctgaatcccagggacccaaacaaacaaacagcctgggtgtgatggtaagcatctgtaatccctgtgctcctatcaggaaacggaggcagagaggagagaatcacccttgaacgctaacgagtgtagagtatgaagtgcggtagaaatgagagagacctcgcttcaacacggtagagagcatttacccctgaaagttgtcctcaggcctccacacgcaccgtgtggcatgcatatgctcacacacacatcccacacacataggcacacaagaataaataaaagcaaaacaagtctaatggcccagaagtgacagcgtgggatgtaggacaaggctgaacagaaggcacctagacattggtattagtggagcaatgaacattgcctgccttccagaggacacgcagaataatctggtttgcccctggatgctggccttggcatgaggctagccatattcccctctgtacctttcacaggggtagctgagtcaagtgtcctggcacgtctctgacctcgctctctcctttaccttgtgcagtttggttgattactggtctcctaaaagagaggtgcataattccccctcacaacctgtgaatgcacactgtttggaaaggagggcctgagtagatgaggttaatttaaggaccttgaaaaggacagggcatccttagttgtgtgaagggccctaaattaatcagcaagaagtctgcccaggagaaacacagggaggacatgatatgaaggtggaagtgggcatggtcatagcaacaagctgaggggtagcggagaagctgcagcctccagagaccaggatagcccaaactgtctcccctccaacctccagagagagcctgactctgcctacaccaggtttgggatttctggcttccagcagtgttgaagaattttaaacttcagcgatgggtggtcatagaataggtctatgatcccagcacacaggaggctgagagaggaagagcctacatttgagggcagcccgggctaaatatagcaagacctcatctcaaaatcaaaaccagagagagatttattggttgaaacttaaagccactaagttggtggtcgtttgccatgacagcctcagaaaattaattctctctgcttagagtccagctcaagctcttagtccaaaggcatgacaccttggaacagtgcctgtctgagccccagctacagtgtgtgacgtcctcatgtggcacctacagagttccaacctgtgatgcctttgcatttctcatgcgtgtcattgcttggtggtgtgtctcagcttttcttgggggaggggtgcacttagtgtgaggactttgtgtatgggagggtttgccattttaaatgcctgtgacctacgcctgtgattctaagtcacgtgtgcagcatttcccagaaggtacttctgttttggttacaaacttccattagctttctgagcaccctgagatggagaccagagagcatgggtgtctagcgtagacgtgggtctctcgagagataccaagcactgtcactgagtgccactgtggcttctctgggtagagtctgcatttttttttcttgccagtgctcagataccacagggcactgtatgccacacacacgcaaaaaaatttttttaaatcaaaaggtaataaagataaataaaaaaagaatgttgcaagatagaaggaacaaaaatgtcataccttcttactgttggcccccaatccattcacatgggctgttcaggggagttcccacctgacctggtgagttagcccagtcctggtcccccaaagcctctcaattttgtgaccccaccaggtaattgatgtcacttaaattctttggcagaagaactcaacaggtgaccatcatatcctccttcaaatatgaatttcaaaacagacatttcatggctctgggggaaagtccttgagggcagaataggttcagtgtccctgggtagggaaatccatgtctgtctgggtgtgtgtggtggggcagggccgggaggtgggacaggggctgaaggaactccactgagtcctactgcacctgtggatgttcttgtccagacaatatgtccagcagcaagattccgtgtgtgagctgcagagcccacagatatgtcctgttgcttagcagttatgtcttgggcaagctactttggactttggtgatggtcccctctgtgtgatgaggacacacaggacacttcactcccttcattactgtcaggaccgccatcataagagctgtggacacccaccacaccatggtaggctgctgtcaggcacagtgtctcatgggtgtctccatcattagtaatagctattcctcctccaaggcctgcttacagaacaacatttgtggggaacgaggaaatgtgtaagggttgttttcatagcttgttaaacctttatactatttgaggaatatttagcaatatcagtaacttccaaatatatctgaggagcctaaaaagagctaaagtaattatagccataatgccaagcgagtcatcagctggctgaagacagtcgttgtgtgtgtgctttggatttttaaaatggtgttccaattgtaaaactgcctgtggtcagcacagttgcaataagcatgtgtctcttctttggagacccaaggcgatttcaagcagagcagtgggacggccgacagctctcttgttctccccccacccccttcatcctcagcactgcctcccatgatttctgaaaggacttggtgactagaagtcttccagtgagtctgtgaggttctgtaacctgtcaggtaataagtctaggagcatttgggggcctggatcctctggcgatttctctcccagctctgtacacctctgagatgggagagaaaggccggtgcctgttggcatgccgtgactgaggatccccagtagccttcagaatcaacatgggctcaccgatgctcatccccttctagaatcttccatcctgaagtcaggtttgtacttgaggtgataccattgaagctctgcttcccagagcatgggtttctgacatgatttagatgtgctcttagagttcgtttattctcacctctctctttctctcagacttagcatcctttctgtcctcctaggccaggctccatcagcctttgatggagcactgcctctgatggagcactccagaaactaaggagtactcttccctgagcagctatgcccctgttgattgattgttagatggtcacctgcagagctggactctacacatcagcctggttttctccttggtgtctgtgtcctttggagttcttcaagacagcctggtccctggtcttctggaagtggtccagccaatgactaacgctcagcccctcccccacccctgaattgggatatgtgtccacaggctctcccctccccagcctgtgaactgagatgggtgctcacaggatcacccaatgatttcccttgcatttggccctcacacaccagtctgcctctgaatagtttcctctctctctctctctctctctttctgttgctctttgccctattggcacttgtaaaaccttcgctgagagacgcttaacaaaaggcaactccagctcatgtgattgcagtctaagtatacagttggtctgacctcagagtggttgttctgctgtcaggtacttccacgtgtccatagaaaaatcgtgaaaggtggtgctactgacctttagcctgtcgtgacaggttttacaagatcaaaatgcctttaaactcactgatgatgtgtgtaatcagcggccgcgtgagttaatgctggacgttgccctctgggttttaaaaacctggtaaagtgattacagactaattagaacaacctgctcttcagtcctgccagatccctttccacacttctcagctgctggaagaatggaagtttcagtcggttctatttctgatatcacagtcagccaggggagctgagaactgggcatgtgcgaggggcctgggagcggtgcagcgtgcacacagctgtgctggaaggaaggcagcagcgcttgcgatccgtgcactcagcactatggaaatgaacttggcccactcaagagcatgaatcaatgcctagccgcctttctaatcacaaagcagcttctatcttgggcactttttagacgttctgtaaaatagactgaactcaacgccagatgacggccagatcggcctcgtttgggcttttgcagaagtcttgagaaattgcagccacatttctctctctgtctcatggtcttgatgacctttcagcctgatccatgcaggatgagacattaaccctgcatattagactcagtattaggctcagtgagcagagttagccattgcaggaccttgatgtctgtggtggcccaaatctgtcctgtagtgtgtctctggtattcacctcactcagggtgcattccctatcttcagagcggcatggtatatggagggcaccaggtgccactcctccacggaccctttagtctggaacactggctcctcaaatttattttttattacattggtttgtgtttgtgagtttctgtgtttctctgtgtgtatacacaggtgtgtttaggcacacacatgtgcacatatccattgccctggcacatgtgcggcgatctgaggacaacttcctggggtctgttctcttctctcatggctcttcttccagggcttgaactcaagtttttaggcataatagtcactaccttcatccactgaaccgtctcccagcctgcgtctgatttttctgaataccacaatgagtgggcactcagtgccctttccatagactcttgctgtcagacttgctcagctgatatttactgaggacacagatgataataaacaagactggtaaggcaaggaacccacattctagctggaaaggcatgcagaagaagctaggttttcattcttagtacttctcttcaaaagagggaggggctttcttcagggaagagaaggttttcgtagaaatagaatttcaccagggaaggaggttagacaggagttcaggcaggaagggggaaatgggcaaagggttagcagcagtgaaatgcacgggctgatttcttacacacttgtacgccagtgaccagagagctaggagctctgagcaggcccagggcttctgagctccttcttccagagtctagaggtgggccaggattcacccgcaatgtccccccttaccttgttcactggaatgtacacatctaaagatgggaaaaataacactttccaatgagggcagaataattaaaatctcgtaggctgtgccatggggtatctgtggcacttggtagcttgaccacagcaggaaatatacctaattctcttcctcactttctaccttaaaaaaaagaatcctaacaaacctgcggttgaagggttgaaggcctcagcctcatcataaagtgtgtccactgtgatgttagccacgggaacagtttctctgactctttcagcacatttattaatatctgctatggactgttttaggtcagcgaactgacaaaaggctcatgactgtgtggatccagaacgatctctccagtccttctgtggtgttacaatattcatttatgtgtttccaacacccccgtatttagtattcctgtgactccgggggaatgttatgaactgtgactgcaactcaaccctttcctgtgaagccaacgacctagtgtccttgacttgattcgagagtttaatctattttcttgactggagactgcaccaaatcccacgtagagaatcctctgagtggctaccccgtatgcgccacgctgctggagttgtgcacaaggtgaagaagatagtctctatggtagtttggaaagaaaatttgagctatggggctcaaatgcaaaatcagcaacttatgagctaattaaatgataaattacctggtagtgcacagtgactactttaccactgagttgactcctgccgagcagacttaacggctgagctgagctgtttctaggtaactgacatcaagcaggtccttatttacaaagatgtctcatggcacttgcagaatctttctggatgtgggacacccttgtcattgtgccaggctggggattcattcagaaagtttcttattgtctttttgtcccttcacttgaagctgagatgcaagagacttcttcccaacgctgtcaatcagcagtgccccagattccccagcctccgagggaacagcttcaggccactgtcagcctcggagatcgaggctgcatcttagctgtcaccagctagctcagcagtgacttaggaagaagcaagcatttgaatgatgaagacagggcctacaaagggcccttgcaccttctctcccagccaaggagagcctgccttttcttcatggggtaaatctggcttttctgctcgccagcactttcaagttcttaaccttggaagaagatgaaacctacaaacagatgacatttagcaggaacataaatacatgcccttcctcaattgttgacttgaagggagagcaaacctactataaaccccagggaggagaaaaccctatctccagaattctggggtacctcctttctcaccagagtcagtaaagccacgtttgaaattctgttcttctttcccattcagccatgggtaagaccacatctacgtttcccctactctgggaagcatggagtaatgactcatccctcctggaatttgcactgagtgcaactgagaggaacggagcagacgtggcggctgtcctagagttagtgctctgtgctttgccttttgcctgggagtctgaggacaactcggaaggctgatccacttgagtgctttctataggactggccgaggattcttatgtgatggtaccacacacacccatctttcacaagtgcgggcctattgtatgtaatctgaaaacagtcatttgacctaaggacactggacacaattcgaatgtgtgccacaatatagccttccgggaacatgagcctgtagcttttgttccacagctagagttagttatcaggagcctcctgttcccaaggcaggaggaaatgggaggtgctctcaaggggctcagcctcatccacactaccacgagcaaggggaagtccttggaagaaaggtttaacactggagtgatggagtcagggggtgaaggaatgctttcctctggaggagcggcgtcactgtggggccttagagagtcacagcattgaaacgggtaaagcacggttctagcagtggctttgcaagctgaagtgaaaggtttcaggatcgtttggtgttttacaggcagtgtgctgagctgcttatcactaagcagacagtttccctgttattgtctgggcgtaattgagcggctggacagctgctggtggttattataacaaaatctcattcagtgctgctacctcgccaaaaagtttctctaaattaaacactgaatagcacccaccatcgccctttcaaccattgaagaaatcccttttacagctccagattctgagatacctacagtggttatttttaaaaactaggctgtgtctttatctccattcacagtgaaaaggactcagataaaaggcagttgatcaaagaattcagttgctgatgtagggaaggttgctagagaggatgcgctgggctttgggaaggatggaaaagagccctgcaggacctctccctgccctctgctctggggctgatcccgatatgcgatctaactcctggcgaccactagttggcctctagctgtgccatctgcccaggggtgggagctttgactcaaagccagagtcaaacaagagatcttctccagtatcatacgtatgcaaaactatattacccattgtgagagatattttatattgtatctagtgtatgtatccagactcaagttgtattccagtgtgtgcattccatgtgtattatgtcctaatcaaccaatcatcatcatcatcaagcaatgatttaagtattttaaaagaaaatttcagaatttttattatttttcctttgattacttttgaaatttgttttcatttagtaggaataacttcaatagccaatgatgggggaattaattaaagcagccatttgtgctccttcaaaactaaaaaagaacccaggcccaaattataaagaatttgttgttgttcgtgttgcttgctcttttttttccttgctgtgtgacataggcagcctcagacactcaagtcctgggattgtagcatgtcttaaaaagaaaagtctcttggataagaaaggggggggttaaaattttctgagagaaagggggaaaaatactccagacaaaactctttccgatggttttgcgtttctgctacttcaacccctagaatttggagacagttatccatggagccactgtttcagtcagctcaaaaggttccctagcttgcatccaattccattttgcagatacttcagtttcaaatactttttacttatgtctatatgtctctgtgtgtgtatatgtcacaggcgtgtagtgactgcccatggaggccagtaggggtggggggtgagatcctctggggttagagttcaggcatttgttagccacctgatgtggggctgggattggaactcaggtcccttggcagagctgcaggtaccctcaactgttgtgtcgtctctgtcaccccactttccagccattccttatgctcccctatcatgcacagtgcacagacacatacagcttcttgctgacgtatgtgacattggttaacattagcctgaactctgctgactgaacagtacccgtgagatgacatcaaagtgagcaaaaatgcaattcatagtaagatctttcccttcaactgtgctgtcaaagactaaaaaaaagagatacggtccttctttttttttatttttaaaaagagcctctttttaaagaaatccaatttgatgctattaaactacagccttgaatctataaagtccaataaatggatgggaattaaatttacatttcttcttatcaaatgtatccaggctccctgtcttggatcgtttctcagtagcttgctgcttagtgttactaccttttaaaggtgtgacatttggcctgtttcttccactgggacaggacagctgggaagtcgtggaaggattgagaggggaaatgacttacacccaggagccgccagtgcagaaaggatttttgctgaaaaagaggaagtggcccttaaaaggctggcacaaggtaagacatcagtggtggccgctccctggtgggcacacactctaccctcagtattaaatttgagaactaatattctatctgaatttggagaccggaggagggatgttagcatgcgtgttttgctaagttctgtttgcttccccacagagattcttctgcctggaaaagggaatcttgaaatatgccaagagccaagctgatgtaagtcttcttacccagtgtgatactgaagacctgcgcagggtgctccagggcagcccagagccgcagtgccctgtgggtaatggtttttccagtgccacagagccccctctccacccaccccgacccctgctgtcttagctttagatctgggagagatccattcaccaccaggagaaggggcaggacaccttacttactgcgttccataggtctgctctggttttagctaatcacaggaacagagcgtgtggcaagcgttcttcccactctcccggtgactgaggggcttagtgtagaaagccatggctaatgtggacttcctcttgagttaaccctaggaggttggttggtctagaggattctgagtgaccagcgggcctgtctcatagggcgctctcctctttcctggccattcgagtcctccctagtttgtctctattcttccctttaagtcggttatggatgacagtagacaacaggcactgttcaagggaaaggcaatgcctcttgcttgtattgccttcgagtcaactcatggagtttccgctccttggcttgcatcctggctatgaaaactcctatttagacttctgtcctccagtctcttcatctgtgagataaggccagtgcttctgttcagagaaagaatgcagtccgtgtgcaacacttaactaggtccggcttgggtggagcgctccatcaatcgtagcgtccaggtttcgcattggcagatgtagaagatgaggtggcaggggaccagggaggatgttacaaccgccttgactgctgtgactcacaagcagccctctctgtgcttctgtagattgagcgggagaagttgcatggctgcattgacgtggggctctctgtgatgtctgtgaagaagtcgtctaagtgtatcgacctagacacggaggagcacatctaccacctgaaggtgaggcttcagccagggccccggctcccaccgcgccgccgccaccagggcttttatgggttgggaagttgtctgaagcagagtcttgctagcttgcccactctggattcaaactcctagagtacagtagtctgcagcttcagcctcccgagacaccagggctacaggcacactctcccagtgtgattgtgcacaggcctttctgctgagatctactgaccgtcaccatgctggtgatgatttggggacatgcattcaacctgtgggcagttgtcatcactaaagtatccctaaggggtacttctgatgttagggtgggccatctctcacaatctctctctctctcactgcttgaagagttagcgttccttcagtgtccttgtcaccatccctaaatgttatcactcctccccagtgacagcaatcaatgacaaaagcaccttcatgtcccctcctcccaggctgtgtcattagtatagaaccatttaccctagaataaaatatgttctccgaaggatagtgtttactctgtggatccctgaccaatggctttagccaattttacaaagacttggttagtgtcctcatattgtagtgaaatgtcagtttttcctcaagtggtccttggcaaatcttaagactcaaagctacctacctaccgcctttctcctgaagatgggtgacatcgtggtaataccaagcacaaggcccagggcaatgccagctcttatgtgactgcttactggctgttaaactttgaccaatcagttgattcttgaaacactctgccttgtttttactttaccccacccccaccccctgtaaaaatatggaagagtgtgtgtttaaggtttgtcataattccttgggggtcagtaatttaataagtttaattattgtttagagtggttaggcagtgcgtgaatgttggaggtaaattgagaattgcttagcttgcttggcgtttagggaatggggctgagggctgggataaccaaggatctcacctatccctgtccttgcctagcttgtgtgtctcatatctgtcccctaacctaaccctgaactctgggctagttcagtgtgtcaagcagttcccctggtactgtgggccaatgatgctttgctgtgggatgtcccaggtgttaccgttacagcctttacccagtggacaccagtggtgtgtctagtggtaacagcctacacaagtgtttactgacagagaaaatctcctcagtgaaataactggcaaagtaaaggagggggaagccacgaattatttatatagcaattaataattaatatcataattttgtctttataatttacaatttaataatgagtataataaattatatatattcataattgtgtgtgtgtgtgtgtgtgtgtgtgtgtgtgtgtgtgtgtgtgtgaaccttatctctctgctcctccctcagtggttaatctctgctgggagagttggcaccgtttacctgtattggtcccatgactcttccttctgtgttttcacatggtcaggaaataagggctccctgcctgtgtgtaactctagttaacaaaatgaagctatcattctcttctactttttaaagacttagactgtcttaagctgcattggacttgacatcatgagacagagcaataattccctgtgactcactgtaaactccgctttgtttctcactaattcctggggatcaattctgacttggagtgtaatcgactgacgatcactgaggtcctccccccccacatccccccactccctttcctctcacctcactcctccctgccatcaccacaaggtctggatgtatatcccaggctggccttgaactcacagatcttgattgctgaggttacagacatgctccagcacacctggcttgattctttctctcattttatacccaagaagtctgggcagaaaagcagttaagaaagtgcccagccaccgtcctgaaattcgcttcagggcctatgccagactgtggttagttatttaatgaagtacctcctttctcttcttgtttatccaatgaaaataaagagtcaaaatgaacgccttgggcactggcttttcggggctttgaggagcagctcagtgcctggatgacacaagattcttataaaattccttttaaccacatctgggaaatgaagtgctcacagtgcagaagagacaaataggtgtgtgtccatttgtgctgtggcttcctgcagacttggactaaggaagagcttccgttttcaggtccctctaagcgacatgaaatcctgattctctgagcaccgctgattctctgagcaccgctgcctctgtctgtctgcatcacctccttcccagctgcaaccttatcaggatggtcacagcactggcctgacaggccactggcctgcctggcatatttggaggttattttaaattacagctttatgaggccatatcctatcctaatctataggcatctcacttttcactttgaaattatgaatttcaatgtgttttatatacaaaacattggcttaaagatgtctgtagtatagaagtgattgctatttttcttttaacacttttatgagcatttgaactatttcttgagaaaaattattagttatagcaggcatggtgctatgcccaaaatcccagaattcaggtagttagtatagaaggattttcataaattcaagttcagcctgggctacatagcaagtctgaggctagtctgtgctacacagaaagtgctacatagtgagtgtattgcactgcactacacagtgagaggcatattgctgagtcacacggaaatataccatctcaaataaataatctcaagtaaataaataaaaaatttcagctaaaaacattcttcctagacagtggatatttatatttccttatctatggagggaatggataaatatttgtgtaataataacaatagagggctggagagatggctcagaggttcagagctttggcaattgttccagaggtccagagttcaattcccagcaacaactatagtgagatctgttgccctcttctggcactcagaggtacatgcagatagagcactcatatacataaaataaatgaacaatttaacaaaaataacaatgcaatggctttgtcagatagttttcctttttctgaaagtagcaaaatggttttcagttacctggcaaatgtgttagcagctccttccagccacgaatccttcacaaagtagacgaacacaggccagtacttcagggaacaccaactacttcatttcagttcagacttgttcgtgaagtttgaactacaggcatttacatgaagaacagagctgatattttcagtagggagtgggcaagtcttaggcaagagaacttggaaatattttaagagataaatgtgaggttcagtttatttgtggcttaataaaaactagccctgtttgcattcttagaagttgcatagtggttaaaacatctcaaaggagacatgagtatgtactttgtgacagttcctcttctttgagtgtcctccgagaccacataaatgaaaccaagacagtacatgcagtttcttatttttcatgcatactagctcaaaaagagcagatcaaaagaggcatcgttttgatgaataactgatcccgtcttagccagtggctctcttctccgtctctcaatttaacccctgccctgcaggtgaagtcagaagaactctttgacgagtgggtgtccaagctccgtcaccacagaatgtaccggcagaatgagatcgccatgtttccccgggatgtcaatcactttttctcagggtcctctgtcacagattctgccccaggagtgttcgagtcagtttccagtaggaaggtaatgattgtgttgccaggagtaagtctgagggaaggtttgtcggtggagcagggtaggttggaggttggtacccagttagtctcttgaccagtatcagatccaggatacagcgagcacggatcaaggcaggagctcaggtaaggagtgacctgaaggcttaggctttctctcagccacactgacaggtttttcctacctgcctgtcggatgcagctaagcctgcgtacagcctcataggattgcggactgttccccaaagtatctttactgtggcggcatcatttcatagaagaaaataaggactgctgcctagggccatggagcatagtgtggcttagctggggtggtggccagaagtacccaaatctcctgtggggtattttgctcaccccgctatcctatccttccttccctcttggaagctgtccctgcctggctctgttttgatgtctaacctcctcttgtcatccgtgaacagcgtagcagtctatcaaagcagaattcatttccacccggaagcaatttgtcattttcttgtggtggcgacactcgagttcctttctggctacagtcttcagaggacatggaaaaatgttcaaaaggtagcagtctgactcttgggtctctttttgccatggcgctgcggtgacatgttcttggcgttaccttcacgtacatttgagtccctgctgtccactcctccgcatttcatcccttactctactaatgaaggtctcgtcatcatcagcccgcatgctctccccacagagcttagcatcttcacctggatgcagacagacttcctagtctatattgtttttaattgtgtttgtgtgtggtgtgtgttgggggtggggggtgcatgtgagcgcagatgcccatagagcctagagagggcatctgatcccctggaactgctccatgtggtgaagttgggccctttgaagagtagtagacactcttaacctgactgctgagccatctggaccctttaaaatgtgggggtaccagtgcgtgtgcctctgtcccaaacatcctgtttaaattagtctggggtgctgccctggtgacctcggtcccaacactcctagagtgagtctgacaaggaggcaggattgatcactcctgcacaaggtaactcagtgttttttaaccctaattagctaaccttagagccagactgaggtttccagtgggagaaagaactcaggcttaattgtataaggtgaggcttggagcgtatggaattgaaaagttttaagttaaaaagaaattgagtgctggatagtttggtttatagagcacttgctgtgcaagatgagagtctggggttgatatccagaacccacaaacaaggccagatgtgatggtgtgtgcttggaatccaagccctggggggctggagataggtgattcctatatgataaaccgctaggaactatggcctttcctgtggggtagtcagatatggaacacagagcctggtgctctccggtgctgttggacagtggtgagcatctgcccttcctcccacagacctggcacactgccatgcctacctgctggaaatgagccagctcttagaaagcatggacgtcctgcatcggacatactcggcgccagccatcaacgccatccaggttagcctgcagctcttctggtcaccttctggcttctgcctcctctcttgttccccacatttgactaacaatgggatgtcctgtgtccagttgctttagccaagctcaaggggatggctgtggtcactgccctgtgcctctgtccctctgtccctgtcgttttggtggcccttactgtctgtgctttctctctctctctctctttctcctgtttcgaaaccaagggtggagcttttgaaagtcccaaaaaggaaaaacgaccacacaggaggtggcggtccagagctattggcaaagatgctaaaggaacgctgcaggtaatctctgcttcgccacaggcttcccttcctcacggtgcctctccgcacaccccgtgcctctgactcgagtcggacagagaggtgaaggttgtggagctgatctctgtgccttgtgtggagagatgactcccataactgagaccctctggtgacagggataaggctgtgaagatacttgggcaggggagagtttctgatggggaaatggattgctgttggagggactgccatgcttgtgagaatttgggggtctttcctccttttaacatctagcttgtctaggatgctccctgctctagtatgtgccttgcgtgatggctgctatggcccaatcttctgacctacccttgttgttatcatcccttcccatccctccccatgggcctatcttctcacaggcctgaacctctatcccacaggacctttagccatttttcttcaaactcccagcccacacaagagcccccattcggggtgccaggagccatctttcccaggcacagcaaagccatgggcaagatcatgtactagatggaatcattgttagaaccaaactgaatctggagcttttagagacacccttagcccctgggagccgaacgtggatgcttcccgagtagacagcattgtatgtgcagatgtgagcagcgggttcattttttttagaagctccgggtgcaagtgaggaaagtcatgtgggaactgatctgctctgacagcctagttactcggggacagtcgtcattttcaacctgtgtctctgaagtttccaccatgtctgagacaccatgtgatttcctgcccgtttgtagttttataggatgcagaggccatggggagcacctccccagtgttcatacatttttctttgaagttatcccttggtgggaagatgcacttctaagatgccccctcaatcagtttcagtcagggaggctctagtttcatagaaatctctccctgtgctgtcactttaggtccctaagcctttttctggccctgtgagactgcactcctccaatcctaacttgtcgacgctggactttggagaagagaagtcttactcggatggttctgaagcctcgtcggagttctccaagatgcaggaggatctgtgccatgtcgcccacaaaggtgaaggagttttcctgcttcctaacataaggggtggaaatgactgtcaatacaaacctgcagatatcatctttaagggaataatagtttattctggagacgattttcagtgaccgtgacccaggaacatagatctaggttgccccaaatttcgtattccaaagtgcaagcagtttcatgaggttttagagttttacagaacagaaaggtcacaaatcaaggcaggtttaaagttcattggcggatacaccagagagaacccatgggttcagccagcagaagatggaaatgtttttcaagtttgcatctgccttgagcagagactttttccagtatcattgcactctaaacaaaacaggacagtaactgtatactgatcatacatatacaggtacttaagcatctaaagatgacttagcatgtattgcagtaagcaggagaagatgttccacagacccaagtgctatctgatgacatcttagcttttgagttgttggaaacttgtggtcttctaaattagttaattccaaaaggtgttttttttttatttgtctctttgttgttttcttatctattagccagaaggcattagttccaacccagaggtaagcaaggactgactgttcgagagggctagaattagcccagagacggtacttagtctctgcacctgcagcaatccagtctctccacagctctgcagcctaaccagtccatccatccttgcagttacagcttccccggagatctcgctaacacgtcctgtgcatgcttgagtctggggcgtcctcagagaatctatctcagtatgctcattttctgctctgataaggctttcgaaagcctcatttttatttatgtctttgtcagtgtagatgttgttgcaaagagtttggttttggcagcttgaaggacacactgagggtttgggatttagctggcagaacccatgggctcaaccaaccgaagattgaaaatgtttttaaagtttgcatctgttttgagcacagactttttctattattaccctctgaacaaaacaggacagcaaccctatactgatcttacatgtacaggtacttaagcatctaaaggtgatttagcctgtactagagagtatggaggaccttctatatgctacagtcagagtattcatgtgctgatagttggattaatatggcatttatttcacccatttccaacccttattgagcagttcctctctgaagaagccatttgtaggaattaacttaagacacaagcatataaagatatctactctagcattattcttcatatgaaaacatagaaatgtgggtttgacattgttagccattccagaaacgcaaatggtgctgctctgaggccttgttgcatacttttagaaaagcagtctcttaatgggctctcaggaaccggatacctcatccagtgcctggtgaccatggggatggtggtgcattctggaaagtggccgatcagcacataaaactaaacacatacctaccataaaatccaaccactgtgctcctgcgcatgtgattcagagcactgaaaacagttatggggagcagctgtacacagatgtttagggtaggctagggttgtggctcagaggtagagcctgcattgttattgttagcaccccaaaactaaaatattacaagcagatttattgtactggcccaacacaattcagtgtccttcagcagatgagtagttaaataaaccatagtatatccatgcggtggaaaactacttagcaataaatagggacatacatttacatatgcagcaatctagagaaagcacaaagacagtagcggaatgaaaagaactgatttctaaagttgacgacttctgtgagttcactttgtaaatgatggaagaagttagtagatgccagagtttaggaacagtgaggtggaggagatgagactgcagctgtagtcataaaggaaccctggtggtgatgggcagttctgcactctgatcaaggcactggttagaggcgtgttccagtgtgatgagatcacgttgacctgtagccacacacatgtagcaatgagtgcatgtaagtccgaagaagtctgagcacactccattactccaccatccctgtcccggtctgtattgtgctgtagttaataaagtgttaccatttggagaaactgggtacagagtacatgatgggacttctgtgctgcttccaagttcctgtgacacactccagtgacacacctcttccaacaaggcctaatcctaacagtccaccaactgggagccagtcatttcagatatatgagccattctcattcaaaccgccacagaaggggagctctccttctggcccagaagagaagcagcgttcctggaatcccggtcatgagagaaatgctcattttcaaatatgaaaaccaaaatgagaacaaaggcaaactctactgtattcctgtgtgcccggagtcttctctggtgttaaatcgggattggtcactttctgaactgttttgagctatggaagccttgaaggaaaagctgtgtgtaccacagtggtaccacaaatctgtatgacccgaggaaagggctgttgatgaattgctcacaattagagttcactattagtgtgctgagagactggattgacatatatgctcaggaagaagtaggattatttagcaaaaatcactaatgcatctaaattaattcaagttaagtagtggtgaaaaggtattttgcaactacgagcaccatgtaagagttgaaacttaaaagaatcagattacagatcatcaaataaatcattccagatagtagaggaatgttactccattgagggaccctgtacacccctccctgccaaaaaaatgaacacacacacacgcatacacgcatgcatgcactatatgcatgcaaaatgacaggaaagaagaaaaattgaagccctactatgctgctgactcctgtgttttcatgtgctttttcactgtttctttaaaacaccatgagatgccagcctcttccacatagtcagtccatttaggtttggaaactgatcattcatccaaatctaagccatagctaagtaacagggattggatcaaattccccttacaacacattgtcttcctctgtttgggatggtgcgcctgtcattgataactgcagttttccctgaagtaaacaaattgtgaaggagagagcacaagcaggagatcgtcagctcatcagaatgccacattgacttcccagtccaaagcccccaacctgatgtagtaggagcctgtagcaaggagaaagggaggggccgagagtcaactgagccatacatgtggtgtccattctatggcaggagctgaaggtttctgtcaatcaaaagcttctcttggggtcaggtatggatatcagtctatacctgtaattccagggcttgagaacagaccaatctgacaagatcctgtatccatccattgctccaaagggcccaacctgtgtcccactgttctagtccaacaaggttgagaataggccagtgaagaggtttaaaaacaaactttgtgactgcctcctgacatgtgtcttccctgtgaagacaagcagatgtgttggacaatgaggagagactgaggcaagccgcagcaggtctcagagcacaggcctcgggtgccaggcagaggctaagaccattggcaagggtgtgggggctggagagatggaggaccatgctctgggtgggtgacttgggtgatcttcgaggctttctgtagctctgtacattgcaaacttgttgggtggttttgttgatgataacatatccacgggtgcaatcactcatttaactatcatttcctgaaacttatttatctctaatgaatttaggatgacatcagaaataaataagacactcccaacatactcctgtgtgatacctctaatctttgcgatccaatgcctctgtcttagttagggttcctgttgttgtagtgaaaccccatgagcaaaagggaagttgggaggaaaaggtttatgcagcttgaagttccccactgttcattattaaaggaagaagtcaggacagtaactcaaacaggaaatgatcctggatgcaggaactgatgcagaagccaggaagcggtgctgcttactgccttgctcagcctggtttcttacagaactcagggccaccagcctaggggtggtaccacccacagtgggctgggccattctccactaatcactgattaagaaaatgccctatagctggatctcatgaaagtattttctcaattgtggttccctcctttcagataattctagcttgtgtcaaattgataaaaagctagcaagcagggtgtcttacagtgtaattacggtctcgtaggaacagcttctggccattactctgggagttataaatcatgagttggccatgaatgaccactgtaatattctccaggtgtgtcttaggctatttaaaaaagttaagcaaccgtggttgaacaccatgttaatcccatcatttgggagccggaggcaggaagaatacacaatacacattagaggccagcttgggcttcatagtgaggccctgtttcaacattctctctctctctctctctctctctctctctctctctcaggggacccggtttttctgatcctcaaggaggagttttttatatctgacaataaaataggactgtttggatttttttccgtttatgcccactgtatgcttacatatacattttcttttcctgcacatgaggtaactggtgaccgaagagcattgttcttactgggcaagcactctactagagagctctactgctagccctcctagctgaacccaggcagtgcccattctgttcctttacaaagcataaacaggaatgggctggtctggtagaaagcctcacctggcatctgaaaggcagaacagatgagctgggaaaacagagccagccaggtgcatatgtgtggtgtctgaggaaacaaatgtgtccacggaaagatggaacccccagggacccactgggacagctgtggtgatctcagggatggggagcctgcggggagatgtctaactaggcataaaatggagtgaggtcccagtgtggcttcttgtcctgcccccaaggccgttgctccttggctcacaagctcaggccagtcctcattcatacactctctaccctatgtgcattcattgtaatcatcatcctgataagggctaagtatcacactactcctactgcccagattccaagaatgtcggcatcagtcactctcatgcatcccccccctctaattatttgggaacctcacatcgggcaccctgattatgctcacctcctagtcttcccatgtccacctccccctttgactccctgcttgaaagaaaaaaaggaaagagcaagtccattttgtgttgtccatatagttattggagcatggtcgaattcctactggccagccccacctggtatactgagtcttctctgcctgcatccactccagaagccgtcaaatgaggaagtgcatgcataggccagtgaggagcggagccaggtctcccatgcccatggacagtaacacctgaaaaggcagcagtccagaccagggacatccatgtgggatttggcgttgacatgggccacagacctcagtatggtgcctggctctaaccagaaccctgacccacccatgaccctcagaagctgcgtggagcacaggcttcattgtggcctcaggtggctggctatacatgccacacacatcaggatggctcctaagacaccaaagcccgaggacatcatcaggtcagcagcacagcccgcgtatgtccacatggctcagacttcatcgaggtctggagcagcagcatggactgcagacaccaacatggcccccagtggtccatgttggtcctttgaggaggtccaatccagagagtagccctttctttatcttgggcttccatggttgcccagatctagggagaccctgcagctgagcagcaggtttggggctgcatctgtgcctgtaaatctctaggctgctgtacaccatctatcatccctgttgggcaatgacagcatgtccaccagtcctttctctcaactgtcaccaccatcatgtctccagttctgcctctctccatggagtacatacctctgttttcctctttccaacctcaccgtcacatatttgttaggcaaggccagggaggttcttggatatcttcatctgagaggctggtgtgtcctctcatgcatcatcataactattatcccgttagtaacactcattgtgtattgcattgggttaaagactttgcctgcatcgtcttatgtaagcctcattatagggtataaagtaaatgctagcagtatctccatgtagagttcaggcacatcagataactttcccaaggtcatagaatgaggaagtgatggaacctttcctcctggtcctagaggcagcaccatagcatgtagatttgcatgaatgcataggatatcaatgaaggttctctggatctttccctaagtaccccaccctcagtcagtcagcaacagcatacagacatacagagagtggacagtcttccttcttgctggcaaatgaagaaagcaagttggtagtgggtatttggtttctgttattgaataggccattcttggataacgatacctctggaaatgcaagcctgtgaaatttaataaaataccaggtcactggagaagccagtcacggtgccttcctccttctgcccttctgtgacaaactgtaatggaagagaatggaaagataatatctagtgtggtctctgggattggtactttaggtagtgattcccttaaccctaggtagtaatttacaccctgtgtgatcagaacctaagagataatattttgccattcctgtttctgtttttctaatctatctctctttgtgtgtgtttgtgcatgtgtgtctgtttgcatgtatgaatttgtgcatgtgcatgccacagctcctgtgtgtgtgtgtgtgtgtgtgtgtgtgtgtgtgagagagagagagagagagagagagagagaacaagaacacaacctttggtgtcagtcctcacttctatgtttggaacagggtttctttgttgttccctgctggataagccagtctgtctggtcctggggagtctcttcctgccttccatctcactatggaatgcaaggattgcagagtccagtatcacacccagctttgcattcggtctgggctctctaacacatgtcctcatacctgcatgcaagcacttaacctgctgagccccgctcacagctcctgcctcagattttgaagactccagtttgggcatttagctgattctgaagttctcacggaacctgcgagctccagacctccgggggctcgcagagtggctgtaaaatcaaccgaggggatccgagtgcaccagccggaagcagggcggccccttacttggaaatcactttgaccttgcagaagagctgcaagattagaacaaagaacttgcacaagcctctgcccatagttctcagtgttccccatccccagcgcattctacacacatgcttatagtgttctgagatccctgtactgtatgcccttctatgaggctttatgctttagtggatttactgggcacagtgaagttatctaactcgtgacacgtcactgggaaatgacactttggtctcccggtcacaatgtcagcttctgaaaaatgtctttaataccgttctcccgttgggtaccagatctacactcaccattgttcttcattgtcctggttcttcagccgggattaagtggagacagtctttcataaagttgatacctcagtacccttgaagaatacagggcagttttaaatatcaggatgttccgttgtctgtggttccctcctgatcagatccaagttgcacacccttgaccgtccttcagtacagcacgactgttctaagtcattggagatggtggtacccagcctcactggttgttgattttgaccacctggttgaggtgcagcctgtctcttctgatatagagataccatatttcccttatagccactgagccttgttcttaactgtttctaggacataaactgaatagcggtcatcttaacctctaagccataatgtcatgggagtcctgggcagattgacaagtgtgtgtaaatgttaagagattctatctttcccctgagccacacagtttcccacccacacaggcctctcccacactcaggctctcctgcacaggattagggaatgctaacttatgtcatttcatgttgtcaccggagcctaaaggtttccattagaggtcactcccacacattcaatatggttttaaaagtcaatgtagaatgtgcatttgccaaactcagaatactttgctaaattcttgcataagaagcacagtttctacatttagtttttaattatgcctcttctttgtcccttcttgtaatgattatatctttatagtttacttcgctttaaggtcggctttcaatagcatatcggtggagagagagaaactgaagcagctgatggagctggacacctccccctccccctccgctcaggtcgtcgggctgaagcacgctctgtcatccgtaagtcgcttgtctgtctcatccatgtctgcaagtgtgcccaggcttgtgagttactaataatttccatttccatggttgcattgaaaattaatgattttcatcgttgagttgaatcttggggagaaaaaccaaacaaattatccagattatattcaagcctttcttcagactttacatattcaaaataatcccagaccatggaagctaagattttcttaactgtttctcttagtttgatttcttccagtttaactgatttttttttctgtttctatagaactcgtatgtctgtgtggctgccttgcagacattcgttggctaatgcttacaaaggctgacatttaggagagtcagtagctgtgaggcatcataactatagatgcactgaataaatagcacagggcagtgagaaatgtccagtttacaggtcttccgtgtccactgcgaagtgctgattctacctaatgctcctcaaatatgtgcatgctgtgctctttgattaaatagcacaaaccgtttagcttgttccccctcacagatgcagggatgagtcatatgaattggctttcaggtgaccatgcgtcttcaaacaggaaaaccactgccggagcctctgatgggttccagcacaccattagcactcacacttcttttcctgctcagcttcagtttcttgcccagaatggctgggctggatggatacgctgggctggatggatacgctgtgcccaggggctccattgatacactgtgccccgatgctaaccgagcagctgaaggtgtctggcgccttagccttgacgtctcaggaagtcagagaacttttgaaacagcatacatatttgctcgtttctcctcacttgtactttggaatttctgccttgagaagagaaagcatgagtgctcatgtggaacctgtctgaagtaccaccgacttgtattttgggtctggtgggagaaaagaatttcaggttcatgtgactagatgccaccataaacactgaagggggaaaaaaggtccattcatgtttcctgtttgccatgctactgagaaaaacgatgctacctatggactgtaagttaattagtatatgttgtcacattactcatgaacacttggctggtattacacagtacttagtggggattctttaggtactttccttcagtggcaattccaactgagctatttttggttaggcttttgagacagagtcttataatagcccagactagccttatgtagtcatgtggtcctgcctccaccaccctcatgtgcttagattatagttaggtgccaactattcgatctttggaggaaagattataaagaatattgactcactccacacatagagtctccattttttttcttatggttggagggaaaacgacgtcttttggatcttgggagcaactggctccactgggttggtgcttttgagtctatgcctttttcctgagggtttatttcttcctggtacacacattctcacagttccagtctgaggggctgttactgcttttagaagggacctctgatggaggtccctaaagttccttcctgtcttcctcatgtcccttccccttctcacagaggtccagccttgtcttgctaatctgcttggccacactcatttgaccatgttttgtaggccagacttacattttctaaggaatatgcttgtacatacattaacagtttgggaataagataaaaatgactagatttctgcgttaagacttgttgcttcaattttttttttagaataatcacagaactattacaatgaatctatggatactgaatttttttttccaaaacagggtttctctgtatagccctggctgtcttggaacccactttgtagaccaggctggcctcgaactcagaaatccgcctgcctctgcctcccaagtgctgggattaaatgcgtgcgccaccaccgcccagcttggatactgaatttgagagacacatacaacacacacagtttctagacgatgtgttgcctcatagaggtgccaggcatggtgaccttgtaatcccagtccttgggaaacataggcaagtgtgaagagtccagcctgggctccaatgtgagaccgtatcccctatgttcaacagtgatgataagaaagggaatacgtgaagcccttgcagagatccaggcggtcaggagagtctggccgcacctaatgatagacctgtagtcatgaaatgcacaggagggccagatgaagcaagtgcatatcttgctttttctgtgagcgaggtcccagccaataggctgaggtaggaggagggaccaccccatgagggaataaatcagtagcttgtctggcagtttcttttatgtttacagctcacacccaccctttgcaagcatcacggtcctttagcctctactgtgtctgagtaaagtttggcttgtacatattttgaaaaataaatcgtcttattccccaaaatggataagtcaccagcacacttcgaagatccatggcagctggactgttaattaaatcacactgggcccatgtccactggcatcttgtcaaggatgggaggagctaggaatcactaggtcggtgggggtagcgttggggagctggcccatagatcagcctggcaggaaataaagatactgactgtgggtcacacaccttaaaagctgatgtttgacttcttctgccaacttcactaacctctttccacttcaattaacatggagtagcctgggctggactgtgacctcccagcctctccctggagcgatggggaagcccagacacatcccgaggatgtcacatccaggggatcttcgctccttgagttgctttccctagtcccctgctgagttttcctgaaccgtccatttactaatacagccctgctattttttaacatattccaggccctagcacaaaacacagatcttaaagaacgcttacgcagaatccatgcggaatctctgctcctcgacccgcccgctgttcccaagccgggggacaacctggcagaggtgggtaggtttctcgcctgctaactgttctctgcaactgccacctgtcctgggtgccctctgtccagctgcatggcttttgcttcacccccttgagtgtccgccatgcctctggcctcccctggctacagctgggctcttgtgttgcaaagccttgctggcagaatgctacttagcactcttcagccacctccttccttcgtgtctccctccatacctcatttccctctatggtcgctatagtgggaactatagagtggcaaacgtttctccttgtcatttctgaagaaacctgagtttctgtgatccaaagtgcccacccagttccttgcccgagtctttttgtgtcctgtaaaagccatgctaatctttactgtgactgtcccttctaccttcttcttcttcctcttcctgctttattttttcctctttcagaacacagctgtatactcctaggggaaaaaagatactgcactacaactgaaatggattagtgagtgaacacgcgttagaaaggccttttacgagatgtgacatagtttagcagcttagtaggaatttgcctcctggaccctagttcaatccatacttagatctcacacacacacacacacacacacacacacacacacacacacccctaccttgatgggcctcagcacgtatcctgctgacagtagcctgttttaagcctgaactctttgactagtctggtcctttcaggtttgcacattagcagctaacacagggcctagtctgtgccacatctagccagcactaagcatctctagctatacattgatttccaagccattcttaccttttatatacattattatcatatgaattacatctgcatgttttatgattaaatagataacctgcgctgcgcatttgtgaaccatgtccagtggatatcagtcaggcttttggttttgagatgaaaccgaaatcccaggtctagaaaaatgcacatttgtgggactaacctcaaaagaaatgaccagaaagctgaaatgttatggcctgtccaggaggaggatagcagggccttgcacttgtccctccgcagtggtctcagtttggctgtgtctctgtctcatttatttcctctttcctagaatttctatttccaatgctttatcctttttttcctgccactgagtgactcaggctctttcccagcaaggaaaagcctttgtagccttcaggaagtaacaacagaaataaataatggccacacaggctgaaacataccctcaatcttgtgtgtgtgtgtgtgtgtgtgtgtgtgtgtgtgtgtgtgtgtgtactaactttaaattttggttatttaaatcatttcaaatatttgttcattgtgtgaatggtgtgtacacacgcatgtaccacatgtacatgtgcacacatgtaccacaggatatgtgtggggtaagagagcagcttttgggagtcagctctcactttccaggatgtgggttctggggattgaagttaggcttggtggcaggtgcctttataggctgagtatctgacctgcactgtgagtcactttgtaggtgactcccaggagccgcagacttttacagccaatgacagaccccccaacaataggtttagcccacaggcttctgcttttctggtctcccactgttcacttactttctgttgccttctttggctgcacagaggaactactgctggtgttgggcctaaatgtgacactctaatatcaccagtataatacacaatcttatattattttagattagaaatcaaaggccggggctcacagagactgaaccaccaaccaaagagcaggggctggacctaggcctcctacacatttgaaacagatatgcagcttggtattcctgtgagtcccctaacaattgaagggggacctgtcctggactcctttgcctgccattggatccccttcccctacctgaactgtctggttgggcctcagggggagagaatgtgcttagccctgctgggattagatgtcccagggtggggtggtactcaaggggggggggtctccccttctcctcagagaaataatgggggaagggatttgtaagggaaggactgggaggagaggagggaggaaggctgagatcagtatgtaaagtgagtgaaaaataaattattaaaaaaatcaaagaccaagtgagagtaataacttctatatctaagtggtatttaagaatgaatgtgatgtagcactcagaagacaggggcaaaaggatagtgtgaagccaacccaaggtcaggtactgagtttcaggcttgtctaagataatagtaagactgttgcaaacaaataaatacatcccattgacggcatctttaaaactataattaaaaaaaaaaaaacaaacctaagagaagataacttaattcctttatttatatgtggggttttttgctctgtttttatattaggatggagccctgggcattattgtacacacccttaaccttgtttcattctatggagtaagggctggtagttgtaatttagaaatagggaaaagcaaagcccagagcagttaaataacttccaccagaagcacagcttatgaaatcaggatgtaaatccagagcatgtgttcttaccacagtttcagacttctgcataaccaggaatatgctgctgagcccgaaggcctggtgctcgtggaaggtcctttccttaaagtgaggtggagacccggggaccatctgcctcagacatggatatggctttatagttctccttcgagaagaaataactagatggataagaaaggcatcaaacttcaatgggaaaggcagactatttaacaaattaggtcagcgcagctgaaagcgatttgaaaagaagcttaagttttattctgttgtgtgctaaaattcaagttaaatatgaaagttgagacaaaatttgattcaaatatttgtcaaactgctaggataagggtttcctaaactagagagtaatacattttcaaaagtgtcaactgaatttgactttttatagtgaaatatttatgaaatgaggcgtgtaaaataaatgaatgaatgaatgaatgaacaaatgagtagataaagccttcagtgaggatgacaggcttagctaatgccaaatcagcgttactgtctttattctgcgaacgaagaccttgtaataccaagtaacggaagccatcaacaaacagcaggaacagatatccacactcaccagcacacagctatggggtttgtttctgtggaattttaaaaaaacttttctttttcaagtcagtcgtgaggtgtttaactactaggatatattcagggatgtcatcggggcacagggtgtgttgacgagttgatcagagcatcctgaactcatgagacctttgggtttgacagcatctgcctggactgcctttcagcctgctctgtggctcccttgccagatgcatgacaagagtcaccccagccagccagcgaagtacctgggctgatgagggactcaattccaggaaattaccttgtcctaagttagtcctcaccagggtctagctcccacgagtcagagttaaggtcaccttcccctccacttgtgtagcccaatgtctgttggtggttcttgtccgctgtgtacacgcccgcaggccagaagccttttctggtctcctcgttcctctgtgattgacgatgtgcaaatatttgcttaattcattgaatggggttgaaattttgcttgcaaatagaatagaaagcacactcactgactatccggatccttccctgagcatgagtctggactcagtggggtgaagaatgggggaatgtgagaaaagaggagagtgttgctccgctaaattgttagtcataccagggcccgaggcttccttttctttaagagtcattgtaagtaaagagagacaagaaaattattcccactcctccatgaataagggatggtctaccaccataggcacctctggcccaaaagagagttgtttgttgacggccccttggcagcagcctgttggcctctgagtatgcagtgagacaccccgcctgatgtcagccagcactgagcagtttagtgtggaaagaagcccgctgagccttagagactaaaagggcgtgcctcagactcggggccctcctcctcagcagaacacaactggtttgtgcttgagacttgtggcatgtgcctgagcaaagtgaagtgaagtctccgtctgggagagaactttgcttctcaccttgtttctgtgaggctcacttctcattggaagctccgagtctcctgcttgcatggacctgggacccagtgtttatgcagtgaaatcctttgtgtggcttgtttctcttgagtctgttctaaatccgtgcaattttatttctgccctgccactaggaaaactccagggatgagggccgagccctggtgcaccagctctccaatgagagcaggctgtctatcaccgactccctttctgagttcttcgatgcccaggaagttctgctgtctcctagctcttcagaaaacgaggtaggagcactgtgttcagtcatctccttcatgaattggcttgacaaacagagtagtaaagatttgtcaacaaaaatgctggactccacggctcctcccaccattactttgaaggtctgcttgtaacacacccccaaacacaaagtgatacgcttgaagagaatgtggaaaatgtgccttccctctgtttctgtcacttagactttttgcgatttcccattcctagttgtgtgttctacctccgcttaaacctgcttatattctgtgcaggttttttaatcattctaatttatgttatacattgtatactgttactgtctgatatgtttgttatactactttaaacttataaacattgttttaaatggatgcataaaataccttactttctggaataggcaaaccccacagttatcctctatatttaatgtaacccattaaatatagaggaatataatataatataatataatatatttatatatggtgtatgatttataaaaattatggttttgtttatgtatttattcccaaggaagagtatgttttgacaatgagttcaaaggttagctgtccacccttttactaaaatattagcatgctatggaaataagaatttttatgacgacagcaatagcgttggaattttctgtttgtttttcttgtgagaaccaagaagaatacagaaggatttccttcctccctcctctctgccctctttcctcctgtctttcttcctttcttcctgtgctgggtattgaacttgggtccccttcatctcctccttcctaggcaagcacttgacctaaatcctcagctttagcttgctttctttcttcttccttttttctttcttttttccttccttctctctctctctctctctctctctctctctctctctctctctctctctccctctccctctccctctccctctccctctccctctcccctccccttctctcctctctctcctcccctcccctcctctcctctcctctcctctcccctcccctctttctttgagcattacctaggcagattgagaggggttctataaaaatagaaccccaaattatttctgtggatttgtaatgtgagggaggtgtgcttggccatttggagcaggttttttttcagaaaggctgctctcttctctgccctgtctttcatgtgtgctatctcttctttctcacagatttctgatgatgattcatacgtcagtgacataagtgataatctgtccttagacaacctcagtaatgatttagacaatgaaagacagaccttgggtaagtgttgcattaaaggatctcagaagcctgcgcgcgcacgcgtgcgtgtgcgtgtgtgtgtgtgtgtgtgtgtgtgtgtgtatacatgatttcacatgtgcatgtacatgtgcctggggtcaaccttgggtgtcattcatgggtatcagtttttgatacagggtctcatgctgacacttgggcttgtcacttagtctagacttggtggcccaagagccccagggatccacctgtctgtgccttcccagtgctaagataagtataatgccttgtgtgcgcgcgcacattcacacgcgcgcacacacacacacatgcacatcacattgtggcattgaatgctacataaataaatgaatgtagtgtttaaagaaaggtataaattataatgtgaatgtaagctgtggggtccctggagtgtctggctaatcctcagcagcctatgacttcaggaagcagcatacagtcgggttaggaagatgctcgtagtcctctgggtacacagcgctctgcacaggtgcccgaacatcacacagtctcagtgttggtttctggtttgccacattcaatactgaagtcgccatccaccacccattttcatacctacaccgaggacagggactgtaccaggtgcctttattttcgtgtctcagctcagctaatgtttgtgaactatgccaatagatgatgtaaacacttcagggattaagcagcaggtgggtggctccccaccatctacaaagcctcccttcagcataacatgttgaaaggaagagaccgtgctctgtagagattcatcccttgataggaaaacctgaaaccccatgagtttgaagtagaaggtcaaggatacgagtgtgagctactttctatgcaatcagagaatgagaaggaaaatgaagagatgtcacacactcactctctttctccctctgtgagcacagagtgctgtgagcactgaaatggtgctccagctgcctaggaggatgactgatgctgaggcccctcccccagagagtaaggaggatgcagaggtaaagccagaaggagggttggtccagaacatagacaacgactatggtgcatcagccgcagccaagatgagcatagctaggctgtcaggccgcttctccagcttagtccatactgtttggctcaaacacagcacatactgggcagaccttccttcatctgaacttgagcactggaatcagatgtcctcagttctcttcagacagtctctgatggtgacagcttctagacatcttgaaaagatgcctgcagaaataacctttacttatgtcctatgactgcttgcgtattgaaagaagaagaacgaacacacattctgtccgtgggtgtagctcagttggtagggcgcttacttaggatgcatgaggttctgagttctatccccagcactgcataaagccagatatgatggtgcttgcctgtaaagccaggattagggaggtagaaccaggaagatcagaaattcaagggcattcttgattgcatagagagttcaagtccaacctatttgatagatgagactctgtatcaggggagaaaatgaaaatgaaaaaaaacaaaaaactgcaccgggcgctcttcagttattacactagaatttccccagagtgcaccggggacactaagtggtcaggatgcttcctatcggtttcattcccaaaatagcacaggtcatgtggcaggacccgttcctgtccgaaggccccagaagtcgctgagaatgtagactgaagggcattttttgagtaccagccccctctctagtccttgctggttgtgtgtgctcatcccgcctctttgccttctttctcacctataaagtgggcataataacatcgttgacttcaagaagtatcctaaaagctcagaagaggctgaggcaacctgcagcagccgagtggctgtggaggcagagtctctgaaatgtcagactagtacatcaaagaaaatctgagactctcctgcaaggttgtttctcaagatgccatcattttctgctatgcacctgtgtcagatttttgcccatttaaccagttaaagtaagtgtggcacttaattggatgcttaacttaccgtgagacttcacagcatggctccggtttcaggcttttctgttcatcaaggctgcctccttgttcagaggtttggctgtgcagtgagtaaatgcgtgtttatgttcaataaatgagcacacaccaggaagtggtgtgtgctatccatcagtacagtgaaaagatgccatctgaaagcaaaaggacaaggaagagctgtcagaccttgaggcagagaggtaggcagtaaacgtacgcacatcattcaccgaaacctccgtggacccaagtccgcgtgaaactggaaaagcagacataaaaacaaaagaaaggaaagaactgcccagagaagcattctagaactcaccaggaagttctcctgtgtcagttaatcgggtggtaatagtgtccccctagcagtttgacaccatttaaaacagtgatgctgggtatggaggcatgcatgtagaatcccagcgcttggtaggctgaggcaggagaatcacacattcaagtctagcctggggtatataaaaatgccctgtctgaaagtaccgtggtagagggcagtgaacaaataacggccagctggggcaggaatcaggagatgagtgtccacagatgctcttgtcttgtgggaaatggtgtgcagctgagctggtcgggcgtcttgtcacggagacagtctcctgaggtggggtcttgtcacggtgacgacaagctcctgaggtgaagagcttgattgaggagggcaggtttcctttggctcacgagttcagaggtttcggcctttggtcctttgctgcattgctgtggtctgaggagcggggaggatgtggagaggatgtgatggagcagggatgctcacctcatggagcccagaagcagaggtgggaggaaggagctggctccagggcctgctctctcccaccccacctattgtccactcactatagagcaggagtcctggatcaaaccattcctgatccaaccagttctcatcgcaactggatccatcagcttcagcacatgagtgggggtgtagatgttccacatctactcagttgcctttcagataacattcacaccacactaaccaaaagtctaaatgcgtttagagcctctcagggcaggtcctcacctgcatgtgttgataaaatgattggaggtccgggcgggcgggcagtttgtgataatcactcctcttggttgttgttgagtttctttgcatttgtttgtttgtttgtttttgcatcatagctgagcattgagaaaaagttaatggctcaacagtaatgactgatttgaaacattttatgatgtttctataacatggaatatttttacaattactaaaaaatgatactattgaagaatttaaataactaaaatgtatttcagacagctgaataagcagaacatgaaaaggccgtacagtatgaggaacacaggtgaagagtacactaacttaccgatagttccagatgttcatggatactatctgggttggtagaataatagatggaaacgattttttcttatatatttagaataaatacaggttagccagtagatagtgcacagcaatcccagtactggaaatgtggaaacagttggttgtgagtctaaggctagcctgggctacagaataagaccgccacatcccaaacaacggtaaacacacagagttgattttttagaattggatgtgtttaagtttttgaggttataccaatctcacctcctattggcatagaaaccccatttccatttgtattctgaatatgaaagccatgcagagctagcttttgagtgggaacttgaaagtctccccaggaatggtttgatttatttagatttatttagcagtgctggggcttggtgcacaacacatgctccactgtggagctgcaccccagtcctgagtcttgctgtctatttgttcagaaatcttttgccaatttctagctctctaccatacactggttatattcatggatgactttaaatggtgaaatgaaaacagaagcttcccagagtcaatcaggcttccttcctttcagggcctgttctcgagagtagtggggaagccagatccaaaaggaggaccagcttgccggcaccgggtcccaacaccagtagcgttagcttgtggagcatcctgcgcaacaacattgggaaggacctgtccaaggtggccatgccggtggagctgaacgagcccctgaacacgctgcagcggctctgcgaggagctggaatacagcgagcttctggacaaggcctcgagaatccccagtcccctggagaggatggtgaggaccccacctcccgcacgagtctcccgagccattctgagcccagaggctctaggcctcgttttgattgctcctttgaaatcatggccatctctcagaaaatatgcagtcctcccctgcctgactgtgagcagccaccgcatctaaaactgcctttggggaagcgaggggctcctgcagctggtgcctgggggcgggtgtttctgttcttcttgtgcttgctctttctctggaagcttccatctgatggttctgataggcctggctggaaaacatggctttaagctgtgtttatttttactaccctcagaatttaatctcctgagttgtttctctcatcccgagtaaatttcccttgagaatgtttttgtttatttctggaattggcccattcgttcctacgcttttggaaaatatcattcacagaaggacattttacatgaaataccagaaaaattcctctctcccttcctctgtcctccctctctcccccacctagggttatttaaataaacaacgatgtttgtaaaactcctgaaaattctagttcaggagacagttcttccagcttcctcacatgtgagctggtggtcacaggattccttgcctgtgtagtgagctgggactccaatgtccttgccccacgaagatttttttgcttgctatttgctgcctggctaaattggagaggaacctcccccgtgggtggggcttcacagaactaggcaacaacatcccacactacctgcaacagaggatgcagaccccttcagactccacacagccctcagttctgaccctcatagagtttcttagctgccatgatttggatatgaaaggggaaccctcagatcttgctaaaagagacatcccgtggtcatttggcctgatctctggggtcttctcatcaaagagattttctctcttgatactaatgatcataagtgtcaaaccacaagtcgtgagtttgcccttcttgttaaatttccccagagagtgtctcctgaagacaggagacaggaagtgtctacggcagatggtaaaagtcggcatttatggcagcttggttcaaagaagatgattcgctttgaacatgaaaatattcttaaatgtgtctctctcctgtggcagtttagaacccttaagatgttcagcagtcgatccctgcacttgcctgtgatcagtgttcagcaactgatcccagcacttgactgtgaacagatatttgtgggaaagcacagcttccagcctgcaatcccatactggggaagctgaagcaggaggattggggccgactgatttcctgttcctgaccttgaacaaaagtttgagctgagcatagtacaatcgcacctgtaatctccacactagggaagagggctgatgcaactccaggccagcgtgacccataatgtaagatcttgtctcaaaaaaaaaaaaaaaacaaaacaaaaagagaatcagaaagtttcaagcaacaccaaatgtcctgagcatggccaaggagctgaagccacagcccagatgaccccttctctgctttgaggtcaccacattctcctgtgtggctcctgtgtaggctcttcgcgtcaccaaaggggagattttgttctgcctgcctctccttacttccagtatcatggataacagtgtgttctttagtttgctgtaacatatttgtgcatgtgtgtgcttgagggactttatatgcaccacatgtgtgtaggagccctcagagggcagaagaggatgttggatgccctggacctgcagttaaggaggttgtgaaccaccatgtgggtgctgggaaccgtgctctggtcttctgcaggagcagcagtgatcttaaaccaagagccacctctccagccctgtattttaaaggagactcaaggtgtttggcattccacttagaaagtgagctttctgtttggtgtgttgaaagctaaggagacagagagagaaaaggaagctgcttagaaatgtgtgtgcggtctaagcaggagggcctgactttgatccctagaacctatgtaaaggctcgtggagtggtaacccttagcactggaagttggcaggacaggtggcttcctggagcttactgaccaaactagtgaactccacgttcagtaacagaccctgtctcaaagaaatacggagaggggaagcaactaaggaagacacctgattctgacctctcacccccacaatacatgcttactccaacacatgacatacatgtgcacacatgcacacacatagagacacagccagtgatagatgagactgagctgagtatagcacatctttccttctcagggtgtaacagtgactctcacagttcctttgctcagtgtgaattttaagtttctgggtgtctactatattaattggtgattagttcagtgtactgtattttctgaatttagggggatcctttggcttccatgtcctctcaccatctgccctgacaccctggtgttgggtcagcccacactgcctgggtgcatggaggatctttagcgttggcatgctgttggatgaatttcgtcccctcaatcagatcttggctttcaggtttcaatcaccagaataagtaggcggttcaaactggttgacttgcctctgggcccaaaagaacattatttaaacctacagtttacacctaagttgcttgagttgtctttaaaccaaaaaacaatccttgtctttctgaaatagaggctttatttctttatgacagatttcttggtgacacagaagtaagccagtcccgtacttccttctgttcacaggtgtacgtagcagccttcgccatctccgcatatgcatccagctacttccgagcaggcagcaagccgtttaacccggtccttggagaaacgtacgaatgcatccgacaggacaagggtttccagttttttgccgagcaggtgatatgtgctctttgtgtttgttgagagcattgctttgcctgctattaaatgtgcttctgaaatatttattttccccctttcactggcttcaaaaggactgagataattacaggcttggcaacataaatccaggatccattttctctccatggaagcccagctaccacccacggcacacgggcctcagtaactctgagcacctgctaggttccatgaagcagcagcagcagcagcagctgtagtagcaacagtacttgttccccttcagatcattagtaaaaggatgtgccaaggcacagagcctctgaccagagtgcgacttataggttgaaagtgtgtccgaacagttggcaccaccattatggagcctggctacctctcagagtagacgtggtcacatcagtgcaatggtctagagttttactcaagagggatcactcatgtgtgtatttattatttagagcaataagcagtgtccttttttttttttaatgtttcctgtgtgcctagtactattgcagatgcccagaccccacagtggaatgggaggctgtagagacagacaaagagtccctgtcctcatctagtggatagccatgttgtccttctgtggcctggggtccgtgagatccttccacgaaagttagcatggaaggttcgggaacctcgcagctcacattagaagtgcagttctgtttcaacagactgtagaactctgggcaacttaacttagcctctttgtgtgtcagtttcctctttaaagtgggggtgacagccaccaccagtgatctgtggggacagagaagggtctggtctatgaagtttggctgctctgtgagattcctgtccttattgctgtgtgagggctcgagtgtaccggggaatgaatacccccatgtgtttgcccatgtggaacactccttcagctaaaatagaaatcgcacctttagaaagatgaaaagcaccttcctcccctttcaggagactacgtcgtccttactttgatatatttctctctcaactcctagaaaactgaggataaagagggagtgggggagggggtgctgaaacattctctgccttctggttatttttgtcaatggatttgcattataggactgggagagacagagtggtgagcttggcttttcttttctgccgcccaccctttgtctctctttttctttgagatgatctcactgcagatgcagtctggcctcaaacacactctcttctggcctcaggcacttgagtaaagggattacaggttcaaacttccacacccaacctcccagaaactaaagaaactgcttgtcctaatgtagtataggctgggagtggtcatgcctcaggtaggagggctgagagttcaaggtcagccttggctccatagagaggtctggagcagcttaggctgcctgtgagaccctaccgcaaagaagacaaatgcagaaacctaaacccagaacaagtgtgttccctggaactcaggaaaacgaatatacagacaccccaaatgtattgccagtggcttcccaggtgaaaaatcagataaatgttgcttaatatgggcagagggggaggctaaatcggtagttaagggatccagtaatctgtctgattcaaattcagctgggttatttaaatactgaactcaaaatggaatgaggataaatgaaaacatgatttggttaccatggtgttatatgcactcttgtaaaaagaaaaaaaaaatgaaggcccaaaatagccccaaactacagctgacaatcagggcaggaggaagagctgtgaggggagaggggcatgtgaggtgggaaggtgaggggcagccatggagccctggaggggtggcaccagtcatggggtctgccagcacatctgctgtggcacttggagaggaggaccagagtccaagggcaggtacccctgtgcccagagacatcaccagagaggaccagataccttagtctgtatgaactggatcccaaggcaaaagcaaacacacaaaaaccatctggccgttgtctgcagcagaggctgtgcccctgtttgcttggtgtgcagcctttcgtatggagcctcagcccatggagcctcagctgtgtcctcttccaatgggagtgacagtgcatggcctgtggaaggatgctggcacagtaatacgctcacctgagagaatgcctggttattgttctcatgtttagagagaacttttaagcatccttaaatatagagtgttaagaggagtgacagaggcccaggagggaggataagatctgctgtatccccctgctagcactggaggctgaacactgctgtgagacagaaaacaagccctcaggcagccttatgctggctttgctgtcctaatgaccactggtcctgatagaggcggagccacatcctccatttggattttagccttgtgacttaagtggctgctgcatttagtgtgcccaagaaaagcgagcctcttgggactgggatgctaccactgtctgtatttgctatgtatttgctgggacaggtggatttccccattagcagattatgtgagaagcaggattattatcacaggagagtattcaatgtgaagatgtgccttccttctgccatagaagtagatcagagttcaggtcagagtctcctttttatggggtgctgggtatatctcagctcagctctgcacacacacacacacacacacacaccttcctcctgttcttatgcaagtcctcactagatgactcactgttatatgaagccctctagcgtagcatatctaagacacagcaacatccttgtcattttatgtctgtacctgcttgtgtggcttttcggcttctgacccaggagaccgtctgccccatggaggcagcatgaggctatacttatccagtatgtgcaggtgacaagcttttaaaatttgggaggattctgtggtttcctgtgacctctagcagtacagatgtccaaagaaacatagtaatgatttgagtaggggccccagtttaagattgcgtgtgtgcacgtgcatgagctcatgtgcatgtgtgtgcacacacttgtgtgctcaggtgctcttggaggccacagggaccactggatccttgggaactgaaactatgggtagttatgcgcatttagtgtgggtgtcgggaaccaaacttgggtcctctgcaagaacagcaagacctcttagctgctgaaccctcaatccatccccctttacaatctttctttttcatggcttaagatgtaataataacagagactgatgaggttatctgagtactcaggatgctaaggcaggaggatcacaattttggctagcctgggatacctattgatcttgtttcaaaaacaaagaatcaagattaaataattaccaaagactcagcagtttgggctacctcttcccgtgcatagagaggattccaacctcaaagatcaagtatcgcctgtgaatgggccctttctatgtgcgttcaaaaggacaagccctagacttttcaaactgcttggtatcttgtagtattctcatctgaagatactgagagcagatgttagcatcagtatgctgaggtcaaaacaggctctctgaatttgctttacaaagaaataaatgcagcacagaaaggttagaaagattggatatttatttaccttgaaagtggatcatgtggaaatggacaatctgagagacttgttaggaggattctataagaatccagttaggacacaatgagggataagcagtcagggtgagaaaaagtagtcagattctgtatctattttgaagtttcagcaggtagactgtgacttttttagtgattatttgggggtcctcacatcatgtatcctgattgtgttcacattctagtcttcccacctctgtcctctccccccttgacctttcctctcaaaaaaaggggggaaggaggagggagagagaaaggtctattttgtgttgttcatgtactcactggagcatgctcaaattcctagtggccctacaccttgccttcgtggggcagctggccccgcctctctccagtggttttctggcatggatgcaggcagagaaagattttttttctttaagtggtcatgaaaagacatcttaatggtgtgctgtggcttgaagcagtacaagagagacatctctggatgcagtccctgctgtgcacagagagagagcacagtgtagggtctgggaccagatatagcacatcggttgggaaggtggtaggcagcaggttctatgctgaaagcccctgcttcctaacttataaaataaggttagtgaagacaattaaaattccatctcgcccaggccaggaagaggtcactcagtgtaaaggtgcctgcctcctagcctgatgatctgggttcgagtccttagaccacactgacaccttcctacaagttgtctactgatccccacatgctaacacataacacacaaactgatgcaaaagaagtttaaaaagttaaaaacacaaaaacctattttcagttcatctaaaggcagttgaccaaataccattttattgatctgctatagtggctttaaaagatcatatctgtattcttttgttttgtttttgttttgttttgttttttgttttttgaggcagggtttttctatgtagccctggctgacctagaactcactctgaagaccaggctggcctcaactcagaaacccgtctgcctctgcctcccaagtgctgggattaaaggcgtgcgccaccactgctctatatctgtattcttatcaaacgtatatatcacaggatctcctttagcccctatgggcagtatgcttctccctatatagagaggaatccaatgtcttccatatgaaccacatgcttctccctgttttataagatttaaaatgattacggagcaggcacatggtgtttgtataccatagtgtgctttgaagtttatattcggtgattttcataagtgtcccaagttcctggtgacgctgtattactcgttcctacactccataatgaagatatgtcaggtgaatagagacctggggttggaggagttaaatttttctgatttaactgcatgcgatcctgcagtttaaaaactgactagactattttgagagctgtcacgtgggagaagggggaatgataaaacactttgaagcagaggactgccttgattataggagttgggtccctgagctagcgaaaagtcctctccaaacctccagagagaagcaggggtcttgctgagtcagacagcacatggggaactaagatacatcaagcaacagcagggttccgcctcctccttcccatagccgggatctcattgaggaatctgaaggtgtgggtgctgtttttgtctctgtctgctccccagtctgtcagttaacaccgtggcaggctgtctggggatccttcagccctgcagctctccatgtacccatataagggatggtttgcaaagcaggttcctcagcacaggtgggcccagagcaaggcgtatgagtgcctgtggacttattacgccaccatcctgtttccttacacacattctcatgccaggtagagctgtgcactgagccgctaatgtgtgcttttgagaacaattcagccacttaacactgaggccccgatctctgttttactttgcaatccctttaaaagctgtggtttgggaaacctgacccatctggtttcagcctccatcttgttcataagaaagactttgggtaggtactccgaatagaagatgtctctgttcacagccattgaaatcagataaatttctggaagagcactgccaatatgactgcttttgttttgttctgatgatctgtgtcaacagcacatggctctgagtgctactgagataaagaagagagggcacacagcccctctcccccctttttgtttttagcttctcaattgatgggtaaagcaatggggggcccccagtgacagtctgctttgaagatcatcccttctaggatgtaaatacttaatatttcattatatattgatgataaataaacacagttttcctttgtgtgttcatgtgtgtttgcacatatgtatgcatttgtgtgtgtgtgtgtgtgtgttcatgtgttgccgggtgcatagtggaaaccagaagaaaaccttgagaggttcctcaggtgccgtctaccatagttttattgtttttctgagagagtggtctggtacccatccagtggcctgggctggctgaccagtggatccccaagcatctgtctctctctccccagtgctgggatgacaaatgcctgccagcatgcccatctgggtgtgggttctgggcctacattctgatccccacacttacacaacagtcacttcatggatcgagccatcaccgaagtcccaacacatttctccccttgacgattggtgaactttcttcaatggctgtggttagctctgcttgacagagatattattcttaagaattatctaaggggtcagggagatagatggctcagaggataagggtgctggctgccaagcctttggactttgagttccatccctagaacccacaaagtgaaaggtgagaactggctcccacaaatggtttccacacttgccaaatgagccatggtatgtaagtgtgtgtacgtacatatacacacacatgcacaataagttaatgaataaatatatgttgttgttgttgttttaagaactatcttgggttgacctcatcagtgacttaagagtctggactttatgattcagttttctgagcccttagggagacatcgtattttgttacttagaagtagctgttctacccagtacagaggaactccagggccaaaaaggggcagtgggtgggtaggggattgggggggggtgggtatgggggacctttgggatagcattgaaaatgtaaacgaggaaaatacctaattaaaaaaaaaaaaaaaaaagaagtagctgttctaaacagtgactctgaccgcttagtcagaatccttgcaggtcttttcaaagcatatcaaacacagtgctggctgggagggtgcagtcctcagacatccctgtctttatgttatactgttcaaatcatgcctgtgtcttcatcacctgagggctgggccaagcttctgggaggcttccagccacagcttccttccctccagagtagaggagctggctatgtcaagagtgccccctagaggacacctgggtccaagctgcagccctgcccctttgctcactcctcagctcaagggaaaggaagggcaggcatagcagcttgtactcaaactgtgttttgtcccttgtctccttcaggtcagccaccacccacctatctccgcctgccacgctgagtccggaaactttgttttctggcaaggtaatgtgctgatccgtttgactgccaccttcatagcactaaaggttttgtttgctccagggatcctctgtccccatcgttccatctcagagctttttctctctctttccctgtaacttctctcggagtgcctcacttgttgaaggatttacaaggttcccagctttttagcagagggtaggcagcaaatgggtttcttgctttttaaaaatttaagtcttagccgggcgtggtggtgcacacctttgatccctgcctcgggaggcagaggcaggcagatttctgagttcaaggccagcttggtctacagagtgagttccaggacagccagggctacacagagaaaccctgtctcaaaaaaaaaaaaacaaaaacaaaaaacaaaacaaaaatatgtcttgtttctaaaattacagttgacacctgacttctattcatcttttttttttaataatatcttttatccactgaacttttccccatttatttggtgtctgtgtgtctgcacatgcacacatatgtgtgtgcgtgcgtgcgtgcgtgcgcaggtcagatgataactagcaggtctgggcttttaccttctgtcatggtttggaaggatggaactcatggcataagtgacaagcaccttttcctgctgaaccatctcactggccagtttgtttgtttgtttgattggttggttggttttgttgttgttttgagtgctgtttggaggaggttttcgtctaagttttgtggttgttgtcatcttgctttgtgtttatagtttttgtctggctttgtctttgctgttctcaagaacataagctaaaaggtttgggaaaggcaagcagggtggtggttttggtattgatgttcctaaaccttacatttggagatggagggagatggaaagttgttcacaaaaataatgcttcagatttttccaaaatgagttagttctgtaaaatgtttatttattcagaaggttggggtacagtaagagaagctgagcgtcccaggttttgtttgttggggacggaggctcacgtagtccaggctagcctcagattcgctttatagactaggatggcctggaacttcttatcctctggctttacctcctgcagtgctggcttcccggcatgcactaccacacctggtttacacagtgccaaggactgaacttcaggccttgtgcatgctactacgcaattaccaactgagttacagcctcagctcctaatcagcttttaaaacattttctttaccagcactgtcatttggttcctgtgcactctttatacacactgacatgggcacatatcgttgtgatacttgaaactacaacagcacactgtaacacttcccactcactctgcctggaggctggcagtattactggttgaaaagtacaagttaattgtttcttttctttaatcttttctatcgatgcttgatattagatattgaagcttcacctaagatctgtctacttttcactaaaaccctctggaaatgtttctcataaggctcccaagcttccacctgataaatctcgtgggccctgtaagtgcttccacttggttttcataaagtctgcatttttgtttttaacaagagagccttttccagatagtccctggaggcccctgtgttactttcctcctcactctttcctgggtggttccacctgtttcctggatataagatcctcaagtcttccccatctcgtctcacatttctctgccctttaactgggttgtttagatgtttgttgtgattatagatgtaagtgattaaagtgtgccttgcttttatttgtcaaatctgttccttgttccccctttcctctttttatgcctacttttgaattagttaaatattgtctctatgtccatttgtctcttctgttgtattatacctatagctctttgttttatgccttagttgttacttcaagattcatgttatgtatctttaaggttttgcagtctgccatcaactggcattattatataccagtttagatgcattaagaaacatagcaaagtaaacctgccctttgtaagattgtgtgtgttataagttggcagtgtgttaatgtctttgctcaaatccaaatctccattttccagttttcataccaattttattgaaaaatactcacacactgtatcatttacccacttaaagtttataaatttgcgattttttttaacttagcacaactaattttaaaatagtttcatcacctcaaaaacaatttctttggcaaacacactctcccagcctcctttaaatccaccatttgcaggatttctttggaggaatccactcacctgcctcacctggaccacaggcacgcatctcctagctgctctgcttctgcctctccctacatttcttctgtctcaatgcggtgaacagtcagggcctgcttcacattctcagtctcccttctccttctcagtgtcagcatccgcaaattaggacgactgacattgcttctaaatattccctccttttctcagcctgtgcctgtttgcccctccattctccatttttgctgcttcccttaagaatctgctgcaccacagctgggggctggactcactcctgcttgtcccctgagcagccacagtagccacttctcttgccacctcactcttaacccctcctgcccatgtcccgttctccgtatggctttgatttttttttgcaattttttgtctcttcacactggttccctgaatgttttcaaagaggacttattagccaggcttgcagaaccaagtgtttcctcaatctgaccttctgctctaaccctcagataatctcagaccttcaggacacagccacagtcgactctcttatacctctaaccctgtaaatactgttttcccaacaccgatttctctatgcttcatgaactcatttggattctacaaaaccctgttcacatggccccttctgaaaagcctcattcaaggcttttggtagacatacagccatcccccccacccccactccatctcatgctacagcacactagaatggcctgtgtttgtgtgaccgcaacttttttcaccccactttcatgccattgactctttcaagaggactttgtattacagctttgctttcctggttctgtttttggggtgcccagttggcatttctagcacaatatggaatgaacagtgtctatctagctgtcttgttcaatacttgataatttgatatttcatttcagatgtgagatggaaaaataaattctggggtaaatccatggaaattgtcccgattggcacaacccacgtgactctgcctgcgtaagtttctctatgttaggaatgttagctctcaggccagagatctacattaggggcgggatgcctcaccaaccccctggcttggagtctgtgtttttttctcttttactccatctggcggtgggttctggtagcctcccctggcagtctcaaagtctagtgatttctttcactggatggcagcacctccttcggacagcagctctctaagctgtgtaaacattcatttctgcttccttctgagataaaaggtcattttcttgatcattgtggtcctgcctccctgtcagaattccgagaccccaggaccctaggccgggctgtggggaatcacatgctgccgtgacctgtgactgttggtcaggctgccacaccttttttgtcactaatgccctcacctgcctcctgggatgtgtgggaaaattagatgttatgtacaaagcacttagaatattgcttactattttctcacagttgctacttaactctgtaagcaatgcctgcgttcttcttttatggaaaagatataatgtgtaattagcaagatctgagagcctgacctccaccccatgtttccctctagtaacatccccttcatatggggatctcaatgcttcgtctgtggaagggcacgactggtggtccaggaggccaccagctgccactgaagcccccagtgccttcaggaggcaggagggtggcagctgaggtattttctggctcaggagtctcagctcacatgtcacttggagacgtatttgatgtggggtctgcagatgagggattcgtttcctgcctcattgtataaattaagatggctgctgcagccgtggctggctctcctgggagccatctttgacttgctcttctctttcagttttggagatcactttgagtggaacaaagtaacctcctgcatccacaacatcttgagcggacagcgatggatcgagcactatggcgaaattgacatcaagaacctgaatgacgactcctgccactgcaaagtgaacttcataaaggtaccttgagtgagcgcgctctgatgctggcgggctgaggcagtgccatgtgcccagggcacgggatgcctcccactctgtcacctgcctcgcctaccatctgccccgagggcagagcctgggagactcttgggaccatgacacagatacatgacgacattacgctaagtggataaccgagacatgaaagggtgtattctttatgattctgatgatgtgaaaacccagaagagccaaattcatagagaaagagaacagaggggtgggggtatcaggggccaggtggagggaaggataggaagtctgtgtgtcatgggtttggagtttctgtttgggaaggtggaagagttctagaaacagatagtagtgacagttgtagaacattgtagatgcacttcatattgttgagctgtgtttttaagaacagttaaaatgaagccaggcttggtggcgtgtacccgcaactccagcatttaagaggttgaggctggagaattgggagtcagagaacagtccgggctatatcatgagactctgtcatggaagaaagaattaggtgaggggacagttgtgcttgtaagctttaccacaggaaaagacatgaccagctgtcccataacagagcttttccctctgtagcggtaaaatgggatagaccgctctgtgctccaggggggtcgcgcacttccagccacctgcccaggagctctttggatcctagaataaaagacacacacacacacacacacacacacacacacacacattagcttaatttttaaatgccttggctaactcaaaggctggacagttctaatcctctgcccagctatcatagatttacctccaatacttctgactcaacgccctctaaatctgtgatctatctttgctgccctgttccttctgggtggccccctggtcttttctgcccaagacacttctgggcagcccttctggggggggggtgcacattccttcttacctacatttcggatgattttccttctgcagctctaaatcggatctgtctccctccaaaacctggcgcttctcctctcctctcttccagttcctagcctgtgcaatctaaaagttctgcccctctctctccacccagccattggccgttggctttttattgatcaatcagaaagcaattggggacaaagacctttagcatttggacaggcagattccctgattaattcaaaacattcaaaccaatccccaacatcccttctctctttttaagtagaagtctgcatcttttcagtagcctgcaaggctctgcaccatcagcactgcccactttcaaccctgtaatgcacgcacataccagggccttcacatgcgtgaggcacatgcatgaggcacgtgcacacacaccctcattccttcccagctcctgctgccctctcaccactgtctgcctcctcagccaccaaccacattggcccctcttgcctcacttccccctccccagcctcctcttctgatgtcaccacctcactctgtcttcaactctcatgatcaaattttcttcaagatatttgttagcactggagttagttagcttactcgttatttctttacctgtctgtctctgtccctgtctgtctgtctgtctgtctgtctctctgtctctctgctccacacccgtagtttcacaacagtgaaagtctgcttgttcctgttcatcctccagccctgactgccacttgattcaaagcacagaggctcggaaccttacagataaatggaaaggccacagatgcaagaacatacgtagggtctctctccaacctcttggattttcgccccacccctttctctcctagagtcttctttcttttaaagctttcttgtatatgaagttgcttgagagcaaaaacccttgtcaaagatgcttgtacctgactgcgatcaaaatcctgagtctgacttcaccggatcctctgcaccacctgtaacccacagggtgcatttgtgaggttggctgggttttttatgataatttataagtcaaatgaggttgcagacaggcataaaaccagcaatgacagtacttcgtagaaaatttcaaagtacaaaaatacttggaaaactttgcctacgtgtttttcagaaagaagccaaaggcaacctggggcatgaatgtgtccctctagtccaggaagaatagctgtccacatcggctcaagggagtgtgctcacttccttagctaccgtctactccgggaccagagaaagaatgcgttaatgtgtttgagtccaggtttgcctccaacccagagcagtcctcctgcatccatcctcagatactgagagtactagtgtgcaccatcatgccccattctacaggaaagaggtttggttttggagatgagcatcagacattgaaataattcagccacagatgccagacacgtttggggacatggctgtctcctctgtgacttcccatctagccgtcaacatttgatttgttgataaatatcgtaaatggaaaaatctgagccctacttcccaataaaggtctggctcctttcttccctgtcacttttacatggctgcagcactcactttgtaatttccccgttcacatctccaggctgatgtgtcccacctctctttgcattttaccaaagcctggaactggcagaaaacgacctggaaatgttactcagatttcccgctttccaaatatggctgttgtttccactgggaatagtgctggggcttttgatttatggaggaatgaatgccttctgtccatgaggaattttaagggtggccaggcagttggagatttctgaagcatcacctttagggagttagtgctccctctgctggctgccgagtggtactgcataaacaaggctgaactgagctatgggcctgggagatgggatgagccaggactgaggcaaaataagccacaagccaggctgcctcacagaccaccattgatagatactgaggaagtagcttgtacaagggccctgctgctggactgggcctagaatggaggaagtagtacaaactgcgattttatgcaacctctttaactggtctgcaaatgactgttttcttcaagtaaaaagaattatgagttaattttaaattgcagaagtgaaagctcccaggcattagtcacagtgacatggtggagcagcacctaatgcactggccagatagcacttgcaatgtactcgatacttggcagaatctaagaactgagttttgtgttcctgtgtcacgtgaaacaaaagtagaaaaagtccatcacctctgcaaatgtgcgttactgggttacaagctgcaaataggaagttaactgcagtttacattgggtagcagaagttttgttctggtttggtttggctggttggtttggttttgtttaaatccagagcctagctaggctgtgggaggaagctagaaagcggagaaataaagccacatgtttatatttaattgatttcaaaaagaatccgagtaacgcatggtgagaaagggcagtttcttcaagaattctgttgggacaactggatttccacatgcaaaaaaggaaatatttgtaatctgataagaacaaagcataaaatggaactcagttgcaaggaaacagtgggtgaatggagtgtatggacgtgcaccccagtcacaccaaccctggggactcaggagagtaaggcaggaggacattgtaagtgctgtatggcaagatcccatctcagagaagatgctacggaaagtgcagcaagccgggcttgaggttagaagctttggttgcaggccttcaggatctgaacttggcatccagaacccacgtggtaggagagaagtgacccctgaaagttaccttctgacctccatgtgtgtgctgtcacacacacacacacacacacacacacacacacagacacacacacacacacaccactgttttcaacaaaggcaaatagagctagaagcacagctaggtggcagtgagcctgcctcccagaaaagggggaacaaaagtacctttaaaatcatccctaaaagcgaacagccaacagctgagtggacgttcagtatcactcgtcatgtcattcaggaaataccaagtaaaaccattgcttagaacagctggcaccaaaatgctgagaggaactgaagagatgggagcccctgcacactgccacgggatgggcgttaacatggccttcagggaggatggaggtcctcaaaacactaagcttctctgagtagacagccaaaggacatgaagacccaaagagccatctgcactcctgagttcatggaaccgctgttcaccggagcaaagggatcagcctcggggccatcaacacttagatacggcatcgaggcagaatggaatacggctcagacgtaaaaacaatgaagtcctgtcatttgcaatatatacataaaggaatgtagatactgtgcaaagtgaaataagccaggcccataaaaatgccccatgacctcatctgtaagtgggacaaaaaatattgactcctagaaacaggaagtagggtgttagttaccagaggtagggttgaggcctagggaaattactgatcaaaggatacaatctctctgcaaagtcaagagagccattaacaatgtatctatagacttgaaaactgccaaccactttctcaagtgctctcacctaaataaatgtgaggtaaaaacatgctaattagcttgagttagccattccacaatgtgtacatagtttaaaatatttttagatgataaaaacatataatttgtatttgtttacaaaataaacaacccagaacgggccatatagaaacactattgtggcgttatttttttttttcctttccctggagacgcggcgtcattaagtcaaggccagcctctgatccattcaccttgcagctgaggataaccttgaactcctgccttccttaccgaagagcacccctacacccggcctcacatctttatcttgcttcctttttctttcacaatacctgtaataagtgaataccagagtcccacccagacttctcatctgcgtcctaggctaagtactggagcactaatgcccacgagatcgaaggcacggtgttcgaccgcagtgggaaggctgtgcaccggctgtttgggaaatggcacgagagcatctactgtggcggcgcctcctcttccacatgcgtctggagagcaagtgagtgtcggccagaccccaagcttatagctgatgagtagctgcctcagggcgggggtgggggagcgctgctctgtgtctagctgccattgcttgaatgaggttagtgctactggccggtctgtcaaatccttctcatgcttacaacagcatctcagttgttctgggtccttgggacctcagaaaggagccactgccaacccaagggtggcctgatgggctctaggggttcacacatggcaccataacaggccttgttggaataacagcaaaacgcaagtaattctggagcaaactgtccgtagaaatgacagagtggcctaggcttcccaaagcatgcaggatcccccaattgctccaaccccaaaagcctccccagtctcccccttgtagtcccagaaggacactccccctggagcacttgtgtcaagaaagtggtggaagccccggctgtaccagcaaccctttcgtcttcagatccaaaaagagcctgtttccaagttggagtcgttttcttaaaccgttgtcctgagatgaggcctttaagaatggggttagtctgtttaaacgagggagagaagggttgggggttgaggtgggaatttaataataagttgaggggtgatggccccgtgttgttacctctgcagcctactggaatcagagacacagaccaaggaggaaacatgtaacacacgttcacctgaagttgggcttgtgttctgttaggaagagatgtgactgtagggtcagtggtgtcccttacaggaggctgcagccgcatcttcttccatcctcaaggctgttgtggaactggaatagtgtcccaggagctgccgttctagcttcagaggcacccacaaggctgcatgccagtctctcatttgctgacagcctctcgtgggttactgtcagatcttcaccattcttccttgactgtgtctccacgtgggcttccagctcccctggcccatgttggaggaaaccatcttccctctggtgggcgggggtctcggctggaaagcacagcatggagcttcgctctcacgttcaagcttaggatgagatacccagaatggcattggctgccagtgagtcttgaaagcttcgaaaagcgtgtctgtggcaaagttcacggaagacattcctatgtggatgtgtggccagcaagggctaaggccgaaagggaagttctggagtctgtattggatctccctggtgtgcacctgatcctgattcttagctgaggtgaaagttagggcaaattagaatctagtcttccaaccctgcgatgtgagattttaagggttgaggcttgatgaagagaaagtcaaggaggaaagaaaagaatactcgtattgaccaccctcagggccagcacaatcgcagctgcaagggcttctagtttcgctgtatgaacttggtccttttgcagtgggagtttagctggttaagatagggccttctgactttattcatttgatttttaaaacatcattgcatgtgtgtatgtgtgtatgtgtgtgtgtgatatgagtgcaggggtattcatgacagcaaaaatgtggaagtcaggggacagctttgtgcagaagtcagttctttctaccgtgtaggttctgagctcagctcattagtcttgagtggcatctcaggaggcccctggtgtgtatatttgaatagcaaattctgtgatagttcatacagtatggatgcttcacagcactgaataaattcactacaggaccaaggcaaagagactgtgagtccctgcgatagaaaactcagacaggcaagtctacggagagacgcgcggtagccgcttgttagtcagaatattttaatagaaatggaacagtttagagttagagatgaaacacagctgatctgagatgaaaacggtggcggaattaaacgaacataaatgaattgcgaattagacctgggtggtttatttctttttcagatcccatgccgaaaggctatgagcagtattatggcttcacacagtttgcactagagttaaatgaaatggatcctttgtcaaggtctttattaccacccaccgacactcggtttagaccagatcaaaggtaaggattttttttcaaagatctttctctccagagacatttaaaacaatcgacaaacagtggtattcacaactgcctggccacctggagtctgaggtgggtactgtcatcagaaacacaagggtaaaatgggggcatgaaatgcttgcacaccaggacggaaccatttctattgaagtaccaggaaagaggaagcagtgggggctactttgaagactttcactgcgtgtagtaataaagaatttactgtttatttggaataatggaagcaccctgctttcctgacccatcgatttaaatttctttttagtgcatttggatctcacttctgattcatgagctgtgtggtctatgacaaggctttccatcttccccaacctccgattcctactccgtaaaacagaataatacccccccaaccttctgaaattgagactcgaaatctaaaggccacatgaaaggaaagatggctgtgtacaatctagatttgtgtaagaaagccttaatggcatacccaagctccaagacaatgatcaacatgagtctgtacttacaaccttacagtgcgggtttggtctagagtcaggaagacatcactcaataggggagaaagtggacttgggagaatgaacagttcacagacaagaaactcaaatgtttcttaaacatggcacaaaaaccaggtgaaaataccatttcttagactggccaaaaaaaaaaaaaaaaaaaaaaaaaagatggctggtaacagcatgctataatatggattatatattataaaatattatatgatataaaagggatatataaattgcttgaactccctatgaagtatagttttataatatagcaattaaagattcgcttttgtccaacaatcctaagtctggaagtttcttgagcagatacacttccctgtgtataaagggcggtggtcctaagtcattcacagcaacatgaagtgtaaacactaaaaatagtaagcgcaactcaatgcctatatgtagagcatgtaattaaggtacatccacaaaactgaatacagcttctaaaaatgaagacgtccaggcgctactgtgcacagatctctacgatctgttgttaagtaaaaaacaaagtaaaacaaagctgttttgccaccatttgtgcccttagaacagaggaaggagtaagaatatctacttatagctgaaaactatgtacccaagaaatgaacatttcctgtgatgtggggctcctgtgatgggagagcgagggaagaagacagacatgggtttttcgggtttccctctggatagaaatcttgaaccctgtaactatcgcctgctcacagcggggtcagcctcttcctgactcagaatgctgcatcgaggtgggaggaagagactgggtgctggaaatttgaatactccgtcgtgtacccagaactggctggttgttatattttcaatgcacagtcctttcctctttgccctcaatccccaggcttctagaggaagggaacatagaggaggctgaggttcagaagcagaggatcgagaagctgcagagagagcggcggagggtcttggaggagaacggtgtggagcaccagccccggtttttcaggtttgtgcctggaggaggtgggggtggggtgtacttcttcatgactgtcccaaaacaggattggggacttcccctttggctctcctgctcctccccagtggctcagcactgcctccttgtagcggaagaagggacacgttcagagctggtcccagtgctgggccatcttgtcccatttgcagctgaggctgctggctagcatggatagatttctcaggacaggctagttgatgacagccctgctgtaggatgtgaagtacctgggcctcgaatcagcagttccaatacacttgtgcttgagtttggaaggcctgattggtcttcactcttcacataactttctggagctaggcatgagtgacttacagtcatactcataatgccagcacgagggaggctgaggcaagaagattggtaagagtttgagtctagcctgggctaccctgtgaaacccagtcaatcaatcaatcaatcaatcattgagagggtcttgcttaaaatatacttaaaattgtaaaatggttgtgagcaattgtagctgtttatccgctcttccctattttaactgagaagaaacagaagcccagagaacacaggagttgaatgaggagccggtggaatcttccagatggggcctttgcccctcctgacagtcttggcagagctcggtgtgatttgggggtttggttgcagcttttgtagcagatgcagactggagggtccactcctgtccaacagccagtggtttattgtttggtgtggccccaggtttatttattggtgtggacaacaggggcagcttttggaaggctgtacggactaatctcagcagcaggacaaaggtctatattccaaaatactgagagagccagtcccagtgacacagacctgtaatcctaacgctccggagactgagacaggaggattgcaagttcaaggccagcctaggcaagttaataatgacaacaaaatcaaaaccgtgcctctgaaaaaaataactaaaatatcactaaggacataggctttattcctaatggagataatggcggcttaactgcctgtcagtggggcaagtgtcatccatacccacaatggaatatccctcaactgtctaaaaagggatgggaaccccaatggctgaggtcaacaagcttacccataataagcagatggcagatgctgctggcttggcagaccacaaggcctcagcaattagcccagttgttcaacatgaaagcaaccatggataatatttcaagaagagggtagggctgtgttctaataaaacaatatttcaaagattatgtggagcttggcgcgtggcttgttgatagaattcttggagagcattcatgagaccctggacttggtcccagcgtcacaaacacaggcactggaggctgaattgggtccttgaccttagtgtgctggctcacagagggacagtgaagacagacatcacacgcgttactgtgtcagtgagctccagtagagactgtggtgtcaaccacccaaggctagagcaccgcccaggcctgtgaagggagaggaggcagtgtgtgtgcagcccaagtgtgtgtagcttcttctccggcagaagaaagctgacaccatcactgcccggaagcagacgtgaggctgggaggtagggctaaccagaaaatggtaggctctggatccttttgtgccctttgaatttctatctatgtaggagatgatcttttcccagagccctaaaccaaaagttctctcatgactgttacggtccagttcctttttgttcattctatttggctttatgctaacttagactgacctcgatcagcctggttgattgggtagtatttagttgttcccagtgtggtggctatcagtccagtcttgtttgatgtacagcatacagagagagggtggatggggacacacacacacacatacagagggggcatccttttagaagcaccaccttcccaacttccaggcttaagtatatatcagaaataaaaaatgtttgtcagtctttggacaccactcaaatacccaaacaagaacaatgaatttctctggagtgatggtgggcaagcaaaggaaggagggggagagaggaggtcatagcggactctaagagaagctgtctcgtctcatctctcacaggaaatccagtgacgatgcttgggtaagcaatgggacctacctggaactgaggaaagaccttggcttttccaagttggaccatcccgtcttatggtgaaatgtaaaagagaaggagatttcctgtaactttgcccacatttgcttccggaagcagcgcacagctgtctgtatgtttaaaagatagcatctagaatgatcacttgtgcttagcgtagcattgtaagcgctgaagtatatattttcttcagtaagtctctttaaaatttcaagtgttatcatgattgtttatatgaatgtagaacacctcggtatttctttttatatatataaactatttaataaaaatgaaagattgaatgttaatgtgtgggttacaaaaaaaaaaacatttaacactaattttccagaggtaagggggaaatttcaaatttatgccttataaaatcacactggaaaaaaattgtcccagatgcgttaagaaataataacacccagggatactcacccatgcatagctacccagggttaattggtagctgggatatcttttcgcctcagacagctcttcgattgctcatacagaacaattctgccggtgctgaagtaccaagaatgttttcatttgcattttcctggttaagaaatctgtataaagttagtgagatgcatattctttatataaggtgggcatcaagcaaccagaagtgcaaacttccctccctttacttctgttgccttgtgtataaaactgcccccagcttgcctagagacgttgccttcatcagagaagactccattaattcagtgtcccaatggtgtcctagggaggcagcagacgtttcgtttgtcctcagtaagagctgaatccttaaaaatttaagaaactactttcagcttcctgctccacccctggcttgcaagccctctttttggcccctattgaggatgaaatgtctctcatttagtataaacagtaacagcccacggcagtgtgaccttctaaacttcagcgaagtcactggtggctttaaataacccagcgttgttcctccacacggctttggtactctctacctcttaccgagcaccgcccttttgaccttgtatagccagtttgaccatctgccttatagacaaacattgctgttcttctatgtcgtcctcttgagaaagctgcaagggtttacctctttccttgactctcttcttatttgtaatactctgagttctgcatctgtctcagacaggagctaccaaagggaaactgttgttcttataagtgtcttactttaaatcatgataatagaatgtgcacagtagctgaattgtgttatcaaaacaactctgacttctgcccagagcacattaaaaccaaagtctgattgttaagcctttgactcggatgtctgtagcagttctatgaaacattgcgtgtaatgatagggtaaagagatttctatagaacgaatttgggaggccagtgagatcggctcggcaggcacaggcacttattgtgtgaacctggcactgggtccagtctccaggacctatctaaaagatagaaggaaagagccaactcccagagttgacctgtgtcacaccagataaccaactgcactgctgaagttttcacaagtggagtgttgaaggtgaatcagtagtctttggagtctacaagtgactgtcattttaagcaactcattaaatattggttcattttttttccatgttgtggagacaccaagatgaacgcagcatgaatctcatttccatttctaagcagctgggtggtgcggcgattctttagttcctgttttgttttttttccttttcaagcgctatccacatctgaccacaggctggagatgtaagcagggatctcggcagggaaacaaacccgagaggacacgtgggatttcagcaatactgactgtgaagtaggcctgctcgagaggccgccccaaaggagaaggaaaatgacaaaaaaaaaaaaaaaatcccacaaaatcgagaatgtatccccagaatcagtacagccagttgtttgaacattcttaaagtatctcgtggtataatttctgttgacttcaagctttaatttggatccacacctacagctgacccaaatgtctcctctgtagtcatcttatttggatcagggagaagcatgaacaaaaatatgttccagaaccatgtgcaagctctgtaagtcactgcccgtgtctggatgaagggctttcggaatgtagatggtcaggaggtgcatgctgctatgtgaatcttaaaactccctgctggagggaggaggctgctacattcctctcgttctgtctcacacactcttcctccgagtttgtgtgtctagaacttggatgtttccataaggaaaacagaactgtggtattgtttcgagaagaattaagtaaagtttaatctttctgaactcctgacttactccagtacacaatgccaatcgctgcaccatttgatgtgcatgtttcagcccctttcattctaattatcctatttcaagtttatggtaagtcacagatgttctcccagtagcaggaccttgtgctaaccacaaactgcaccttctcagtactcacaaccccgatctgcaaggtatcgttaaggaatgagtatcttcagtgtggcaaaggagtagtgtagttccctccacaggccctgtcgtaataaaagcctcagtgcagcttcttcctgcagttcacatcttgatgctaggatgctcctggtactaactaaacattggcagttcacatcccagacaccaggggtcaggtactaactaaagagatggaatgcagtgtgctttttgagacactagggggagcctggtattaactaaacagcttgccattcaacagtctcaggagggttcttgtactaaacagatgggggttcactctaggtcataaatacaattacctactaagtagcaagaatgcctcagcaatccccaagccttccagtgcctctgggggcttcctgatggaaaactacacaaactgagttttttaaatgttaactccacttaggcttctgttttcctcatatcctatttttaattacttccaataaatcatttgctcagccttctagcactgtcttcctttgtatttgtcagatttatgatgcattgtttcagtctacccttaaagaagtcaagccaaaaatagaggtgagggctactttgcttcttaatgtaggcctactgtgcacaccacacactctctctgagggactgtagctattagatactgtcctcacaccctcgagctaccagccagggctctaagttgctctcgtgatcttagttagaaatacaggctacagtgtttggtcagaatttattcgaatgtctttatttttaataccaacatcagcataaatctatttttgctagtagatcaaagctattttcacacgctctgttttctatcttgtatcgatcctgcgaatcagtgattatctttgttggaaaaccttatcaaatgtgtctgcaaatcaagatggtctaaagtgcaagccagttttttgtttgcttgtttttgaaactgggtttaggggatacagttgtcagaagtgactcattcgcttcatttgtgatgatttttttttaatcttcctctgttagcccacaggacatgttttggggaaaatgatacttgtaaatcttctatttaaccatttgtaaaatctaaatcataccccactccccactcccatttcgattctccagcggctccttttagtttgttgtcttgccctactgtgtagctcactgactgagaataaagaatacagcaaaggctgcctttgtctttgtttttcctggctgtgtgtagctgtggttgacggaaaggcagcaagatgctggctagagtctgtctagaagaacatagctgctcacctaaagtgatgcacactgagacagtgacttgggaagacctgggttgctgtagtcttcttcctggcatttcccagcattctcagctctaggaataggcactagaagccaaaggatcccctactccacccaccttactatgctatggaaatactatttcctctgtgtcagaacatgaaatggaagagtgctaattgattatgcctgtgtagtcatacaaatcgtgactgacctatgcacgtccctctctaaggtgcgtccctgagcatccagtgaactccatttggttcaagttggtgtgtcccagcattgtttacaatagagtggtgctaaagaatatctgaaaagcagcctaagaactttgaaattattggccactgtttgctcatgttggtattaaagcatcatgatccagacaactgaggagacagtttggataatatacctcaagtttaaatcttcagtcacgttcttactatacccctgccattgtactcacggacatcagtaatgagcaagccaggactgtctccccacctggcgttcccataacacaggccaacccaacagattcaagagaatgagatgaagggcccagagcaagtgtgaaacatgggagattaacaagacaagaagcccatgctgcctcagtggcaaatggagctcccagaaaggaggcccatcaggagtgtggctttgaaggtacatgccactttgctagacaatccagaactggctggaagagctgtcccttcctaggtctcaaatcaaccattcatgtaatggttttaatgagctgagaggaggctcttcttgctgtcatttaaactcagagactgagaaagatacattaattaagactctttaaattcggttaaggtcctcggagtaatttacacgcacacacacacacacacacacacacacacaatttttctccgggtatttcaaacctaggcaacccagggcacagtattgatcagcattttagcaccaccatgggtctgggacacaattgttctgctgcctaggaacaaatttcttttgattcggttgcaaaggagtttcacttcttgcccagggtggacactacaggtgtgtgcttccgtgcccagctattgctcaggaacttttttaaagggctgcacgtaaggaggccccagctgctgctgtgatggagtcttgggaggtacatttatggagcaaggaagagttctaaacccagacatttctctgcctttagaagccgtgcatctggtggcaagctagtaagttagtcactcatcagagtgtggtcagacattgcccacatggtccacggagagcgaatggcagttcctctaaattggtgatgaatctagaggaagtctgggtctcagcgacagggaagagataggaggggcctgacaccaaaagcaaaacaacccatcctgctttgcccaggtcattctctgttctatcatagagtcctgttaagcaggagctgctgtaggcttagataaactgagataactggtcaacctacactattgagctgccatatcagctctgaatgttctactagaatgagagagagggggagagggggagtgggagagagagagggagagggagggagagagagagagagggagagagagagagggagagggagagagagagagagagagagagagagagagagagagagagagagagagagagagagagagactcgggccagtggtacaaaacaaaacaagtcttccattcttactaagccactgggattcctttgataacatcatcatggcctgcctgtcacatcagtacaaatgcctttggtccacagatcctatttttcttgttgcagcctaccatgtctgaaatacaaccgatctctcagtctttctacagccttaaaaaaaaagaggacaagcctttaatcccagcacttgggaggcagagacaagtggatttctgagttcaaggccagcctggtctacagagtgagttccaggacagccagggctacacagagaaaccctgtctcaaaaaacaaaaatccaaaaacaaagcaaaaaaagagtccccttggtcatgatgtctcttcatagcaataaaaccgtaagacagaagttggtaccagggactggggtattgctataataggcctgaccgtgtttttgtttgaaggaatgtggacttggggacattggattaggaaagcagtagagtgctttcagtgtggcttaattagccatcctagtaggaacatggaagtcaatggtgctgagggtgatttgaactttggccgcctggctcaagaggtaagaaagatgatgtcgtgagtgtaggagatcctttagggcatctcagtgctagtgtcctgtgagtaaagtcaatgggcaactgcaacagcctgacccaagcaggatgacaaagggcacagacccatcaggaatgaaggtgtggctcacttccccaggaaaagatccaagacctgcatgcagaggatgaaggaaatagagaatgggtagtagaggaaggtagttataaataccatctaagccacatgaccagttacagaagcgaggattatagttgacatgagtacttctgttgtattttaagaatgtatttatacaaataattgtgttttctttcaatttctttaacacaaattatcatatttaagtttgagataccaaaatatattccccaaaggacattgacacctattccaaatttgcaatgtgtttgtagttgtacaagtgatagttatattatattaggcattattatgacccgagtttttgtttgtggttgtatgagggatagttatatcatgattatgatagggctattgttttcatttggatgtaagaagatatgattgtatgtcaagttgccaaggggcagactgtgatagctattctccatggtcaccctgactatatctagaatgaactgcagtccagacatagaggacacacttgtgatccagatcttgaggctgaaagacaagggcttttgattcagatcttgaggtgggatgccatatgcttttcatcacaccattaattgacacacatctttaatccagatcttgaggcatagtagccatgcttataaagatctataagtaaatggaattaaagaaaagcttaggtccaggtgtggtggtggtacacaccttttattccagcacttgggagacagaggcatggagatctctgaattcaaggccaccctggtctacagaacaagtttcagaacagtcaaacataggcagttaaggaatccatggcaaacagaaagctggtgaagatagaattaaacaaggggacatgttctggcctcagcatgtagcagaacgtggcagcttcagccacatgattccgtctttagaatcaaggatggaatttccctctgatactaagcaaagttgcagaggccaggaatgtatcaggggtatccctgcatggaggtccagagaggccattgtgttgaaagaggcgttggatctttctccacatctaaggaaagccactggggccaaatatatggcagggagtttgcccagctggttttttggtcttgctttggtccagtatttcctcactacactcccttccctccattttgagatggtaatttacatcctgtgccactgtatattgggaatatgtgatctggtttctttactttgattttataggcgattacagttaaaagattgcatcaatctcagaagagactttgaactttggacctttaaacattgttgagactgtgatagactatggggacttttgaagttagactaaatgcatttgttatgtctacaagcatgtgggggccagggagtggaatgtggtggtttgaataggtatggcccccatagactcgtgtctgaatgcttgacccacagagtggcactattgggaggcgaggcattgttaaaataggtgtgaccttgttggaggaagtgtgtcactgttggggcaggttttgaggtctcctatgctcaagttctgcccagtatagaatccagtcactttctgttgcctgtggaccaagatgtagaattatcagttccttctcctgcaccatgtctgtctgtactctgccgtgcttcccactgtgatgatagtggactaagcctctgaacctataagccggccacaattaaatgttgtgtgtttaagagttgctttggtcatgatgtctcttcacagcagtaaaaccctaacttagcactcaaacacataaaattaaaaaagtaaatctttaatgaaacaacaaaccagaattccaaagagtcacttcctaagtggcattttctgtttctgctctctgaagtgtccctgaaagcctgtcacttaatcagtgtgccttggggtccagataaagggccaggctttggggcatcacaggcacgcaagaaggatcatctctgtggcaatttcagagtgttcacgtcttagctgttttgtttgattggttaaaatacttagcattcttcacatgtaagagtttaacctgggcggagaaaccagcttggtagagtccaggaaaactccagaacccatatgctgttcctggcagttgttcttactcatttaccgagtcataaagatgtgtggttgctgttattgtttgcctcctaaatgtcccccagagccagtcttttgaagacttggttcctaggccgtacttctattgggaagtagtggaacctctgagaggtgaggctggtagaggaattgagtcactgtgttaggcccttgaaggtgatatgacgactcaagcccctccctgccccaccccctccactgttcttcctgcctcctggctattgtgaggtgactgcttcctctgcccccagcttcccattcactaggctcttcaacttcaccccaggtccaaaagtaataaggtggaatgaccataggctgagactgaaatcacaagccaaaccctttcttcttttaatgtgtgcatctcagatattgtgtcaaaacggataactaacgcaattacttttaaaaaatagttaaaatttaaataattataaaatcatgtaacaacacaataaaatggttggcactcattagttttagaaatagacattttactttagaaatagacattttactgggcatggagatggcggtacatgcctctacaggataggacgggaggattgctacgagctttgaggccagccttagctacatagcagatactgactcgaagagccaaaatgtaagataaggaacagaaaatttacatgcctactaccccagtgctaggtaacctgaggcagggaggcactgaacgttcaaatccaacctggaggtgctggttactctgttgatttggacagatggagtcatctgggaagactgcacatcaagcgatgaatttcctccatcagattggcctgtgggccatttccttgacttataactggtgtgaaagggcccagcctggggtgtgcgtggtgccatcccaggcaagtgttcttaggttgtgtaagaaagcaagctgagcaagctgtggacagcaggcagtgagtagtcagtattctacttccgtggtctctgcttcagttcctgccctggcttccctcagggatgagtgataaagagtaagtcaaacaaacacacaaataagaccctttcttccccaatcactttagatcatggagaaatgagcaagactattgctgtgacaactctaaccatgaggtatgggggaggattgcagaagtatttggaactttgatttggaaaagccgttgagtgtgccaaacttaatgggctgttctgtgggagcttggaggattagcgagttgagggaaataccgtcagcagacgcctggcttgtgatgtttcagagggaaggaaaaactctctcagggctcttcggatgatattctgaattaagagcatgtggtttctgttttactagggtgggtgaattagctgtgattaacaagactctgggccactgaagtgaatctgttgttcctgggacatgtgaggctggttagctggggcctgtgaagtcagctgtagttaacaagaggcaacagcattgaggtgaagtcttctgggaactatttcttcagggtgagcacacactcactgtggtccagatggaccatctcgagatgacgaccagacttggcagtgtatgtgaggctcccacatggcattggttttaaaggcacaaaggggttgtggggagcagctgaggcttggcaccgtgtgacaggattggagttcctatggcaccatatgacaggattggaggtcttgtggcaccatgtgacaggattggaggtcctgtagcaccatgtgtcagaattggaggtcctgtagaaagaccctgaagccatttgtaaaggtgcagcctccattgtggactctcaggatggaaagggacatggagaaaggctgagctttggttccatggaccaagaagtcccgtgaccttccaaaacagtgccacaagctatgacccaagtgttcaaatacaggagcctgtgggggaacaattcacacccaaaccatagcataggtgcacacgcacacgcggatgaatttatggccttttaagagtgagaagggcacagtctgcatcagactggcacagggagaaagatgccccatggttcctgaccaccaggctcaggtgcttctcagaactatgatggccacataggttttcactaaggcattaactgtaatctttcagcactgaaatggtgaatcttggtgaagtcttaaaagacctggtcataaaatgggttagatttagaattatcatgttggcatttgcaggaactggatgtctgaacataggtgacacaggacttcgaccacagtgtagatgacacagaattgtgtctctgtgcccttccccatatcttcttgtttctgagacttgtaaataccctaaccatacctaccatagctggtccctagaatctcatccttatcatacttcatttgtagcacagattctaagaactagtttggactggtgagttggacgggccagtaatgtgtcaggaattcccgatatctcctttcaatcttttaaacaattttttgacaggtcccatgtagcccagactgttttatgacttaccacgtagccaggctggccttgaacttaccatccttctcttgtttcccaagtactgggatgctgaacatgtgcctagcacagcaactctgaggtaccatagaattctactcattttacacattagtaccacttttgcattcttaaaaatataattactaggacaattattgttcttctgtgcctcatttttcaaattaagtggaccataatcttattatataaccatcttcattttataatatagaaattaatcagataacatatatcaaaagctatctagcaggtcatggtggcacatacctttatttctagtctcaggagccagaaacagacagaacttggtgagttgaggccatcctggtctacatagtaagactttgtgtcaaaacaacagcaaaagtaatctaactatatactgaacgcatagtggatgatctaaatttagcttttttccttgttcctaagctgagaatctaaagtaagttatctgccttcttagaactagatatggtggccacataatattttctaacaagagaggaaaacgtgaccataaagcctggcattggagtcttcaggaaaggggctaccttcattgacgagctgtgatatcttaagaaaaggaaacctgagagatgtgtcttccaggatcacctgttgtggaagacttagctgttggctttagtttcttttattcccaatggtttagaaacaccttccacacactctgtgattttatttgtacacatgacaaccgggggctgtgttccatccctcggatcttcccaaggaaattgggcaaatggactagttactctttcatgacagtgacccaatacttggcaaccgaatggaaaaagagctgtttttggtttacagtgtaaagatatagtctaccatgctaaggaaggcatagtgacagggctgtgggacacctgatgacattgtatttgcagttgggatacagagaggaaacaggaaacggagccagcacccaatggctgacttcctccactgaggtcctgcctcctaaaaagctctacagtcttacaaaatagcgccaccatctggagaacaaatgtccaaatatatgagcctatgggggatactttacatctaaaccacaacagtaagcttgagggagtttgtgagcacacagctttaaagctggaagtgagtgtgagagttggagagggatggcaggggaagggtgacaactgcccgtgacacagtctgtgtgcagcagcaattgaatgctagcagtagagattggcgtgagaggaccacacctttggagcaactgggatgaggatacaaggaagatgaaggatgagaaagtcccttctaattctcaagtctctcagaaagacagattgtccactccttcttaaagcctgcaggatggacctgcagacgtagctcggttggtagattgcttgcttggcatgcacacaacattgagttttatcccccacactgcattgtctagctcttgggaggtagagcctagagaatcagtaatcagttcagggccatccttggctattgaatgagtttgaaggtaacctgggcatattagaccctatctaaaagtcataaacttaagagattgcttagtcattagaagtatgcactgttcttgtagaggacctgagttatgtttccaacacccacatggggtgttcacaattgcctataacaggagatccagaagcaggcttctgtgggtattggcacccatgtatacatgagtacacagacacacacacacacacacacacacacacacacacacacacacacacatacactcacactttttttaattaaaaaaaaaacttcaggataatttgctctcaaccttgacctcatatgttttgaatacttttgagcatcccagacacacacctatgaaattaaagatagggaaattaaagacaaaaggacactcaaaaactgaatgaacagcaaatagaggctgtgttagacaccggaaaaatgcatggcatctgaatctttctgtgaccttggaaagtccagagattttcagaactgtcaaagaaagatgagggattagaaagacactggagtccatcctaatctacaaagaggtcctcaaaaagacatcttttccctttctacccaaagactgcaggacggaaactgggggtgtagcttagtttgtaggatgcttggaaggggtgatagatccaggaggaaatctttcagggttgtattccctgttgtatatagttgttccttgctatccatagggaagtgacttcagggcatacacagatccctcaatccagagatgctcaagtttctcatacagaatggctcagcatttgcttatagcctctcttaagctatcgataacaatggctaacagaacacaattaacagaacactatttgctgtggacagttgttatactgtattatttaggacactgacaggaagtgtatgttccagggagaggggaaagtcgttcagttttccccaaggattctttgttcttgtccacagcttagggggctgtgcatcctagccccagttctattcataaggcctcttgcttgcagacccctgcacccccgtgtggtttcagaagggagggagaagcttgggggtatggcacagcagtgcttgtccatcgttccctaaactctggtttagtcctcagcgctatcaaaatttacaagacagaaagaggagagaaaagaaaagaatcaaactgggtgcagagcacaaacc

SEQ ID NO: 940 - DNA, 6799 bp, Mus musculus
aggctcctcctcttagctccctcccctcgctccagctcttcagctaattgcccggcagcgcgcgccctaaagttctaggcgaagtattgagaactggtcgcggggatcgcacaccggccagtagcaggggaccagggaccccggcaccaggagagctggtgcactgcgcgggctctcgcccaccatctgtctgcgagcagcgctcggcgccccagtctcctgcggctggtgctggaactgccgtcggctgagacttgcagggacccgagaagcccggtttgcgtccttctcggtctgaagcacgcactggggaatcgagaagcgtccccagcagcggaacacttaggtctgtcctgtgtcagcgaagaccacgagaagagagtcatgcaacattgatcatactgcctgccttctttcggaagtattgaacttattcagctccaccatcttcccatggcattttgactgcgctgagcccaaaggaccagctcttcacaatgagtgacgagaagaatctcggtgtgtctcaaaagttggtttcaccttcaagaagcacaagtagttgctcctccaagcaaggaagccggcaggacagctgggaagtcgtggaaggattgagaggggaaatgacttacacccaggagccgccagtgcagaaaggatttttgctgaaaaagaggaagtggcccttaaaaggctggcacaagagattcttctgcctggaaaagggaatcttgaaatatgccaagagccaagctgatattgagcgggagaagttgcatggctgcattgacgtggggctctctgtgatgtctgtgaagaagtcgtctaagtgtatcgacctagacacggaggagcacatctaccacctgaaggtgaagtcagaagaactctttgacgagtgggtgtccaagctccgtcaccacagaatgtaccggcagaatgagatcgccatgtttccccgggatgtcaatcactttttctcagggtcctctgtcacagattctgccccaggagtgttcgagtcagtttccagtaggaagcgtagcagtctatcaaagcagaattcatttccacccggaagcaatttgtcattttcttgtggtggcgacactcgagttcctttctggctacagtcttcagaggacatggaaaaatgttcaaaagacctggcacactgccatgcctacctgctggaaatgagccagctcttagaaagcatggacgtcctgcatcggacatactcggcgccagccatcaacgccatccaggtccctaagcctttttctggccctgtgagactgcactcctccaatcctaacttgtcgacgctggactttggagaagagaagtcttactcggatggttctgaagcctcgtcggagttctccaagatgcaggaggatctgtgccatgtcgcccacaaagtttacttcgctttaaggtcggctttcaatagcatatcggtggagagagagaaactgaagcagctgatggagctggacacctccccctccccctccgctcaggtcgtcgggctgaagcacgctctgtcatccgccctagcacaaaacacagatcttaaagaacgcttacgcagaatccatgcggaatctctgctcctcgacccgcccgctgttcccaagccgggggacaacctggcagaggaaaactccagggatgagggccgagccctggtgcaccagctctccaatgagagcaggctgtctatcaccgactccctttctgagttcttcgatgcccaggaagttctgctgtctcctagctcttcagaaaacgagatttctgatgatgattcatacgtcagtgacataagtgataatctgtccttagacaacctcagtaatgatttagacaatgaaagacagaccttggggcctgttctcgagagtagtggggaagccagatccaaaaggaggaccagcttgccggcaccgggtcccaacaccagtagcgttagcttgtggagcatcctgcgcaacaacattgggaaggacctgtccaaggtggccatgccggtggagctgaacgagcccctgaacacgctgcagcggctctgcgaggagctggaatacagcgagcttctggacaaggcctcgagaatccccagtcccctggagaggatggtgtacgtagcagccttcgccatctccgcatatgcatccagctacttccgagcaggcagcaagccgtttaacccggtccttggagaaacgtacgaatgcatccgacaggacaagggtttccagttttttgccgagcaggtcagccaccacccacctatctccgcctgccacgctgagtccggaaactttgttttctggcaagatgtgagatggaaaaataaattctggggtaaatccatggaaattgtcccgattggcacaacccacgtgactctgcctgcttttggagatcactttgagtggaacaaagtaacctcctgcatccacaacatcttgagcggacagcgatggatcgagcactatggcgaaattgacatcaagaacctgaatgacgactcctgccactgcaaagtgaacttcataaaggctaagtactggagcactaatgcccacgagatcgaaggcacggtgttcgaccgcagtgggaaggctgtgcaccggctgtttgggaaatggcacgagagcatctactgtggcggcgcctcctcttccacatgcgtctggagagcaaatcccatgccgaaaggctatgagcagtattatggcttcacacagtttgcactagagttaaatgaaatggatcctttgtcaaggtctttattaccacccaccgacactcggtttagaccagatcaaaggcttctagaggaagggaacatagaggaggctgaggttcagaagcagaggatcgagaagctgcagagagagcggcggagggtcttggaggagaacggtgtggagcaccagccccggtttttcaggaaatccagtgacgatgcttgggtaagcaatgggacctacctggaactgaggaaagaccttggcttttccaagttggaccatcccgtcttatggtgaaatgtaaaagagaaggagatttcctgtaactttgcccacatttgcttccggaagcagcgcacagctgtctgtatgtttaaaagatagcatctagaatgatcacttgtgcttagcgtagcattgtaagcgctgaagtatatattttcttcagtaagtctctttaaaatttcaagtgttatcatgattgtttatatgaatgtagaacacctcggtatttctttttatatatataaactatttaataaaaatgaaagattgaatgttaatgtgtgggttacaaaaaaaaaaacatttaacactaattttccagaggtaagggggaaatttcaaatttatgccttataaaatcacactggaaaaaaattgtcccagatgcgttaagaaataataacacccagggatactcacccatgcatagctacccagggttaattggtagctgggatatcttttcgcctcagacagctcttcgattgctcatacagaacaattctgccggtgctgaagtaccaagaatgttttcatttgcattttcctggttaagaaatctgtataaagttagtgagatgcatattctttatataaggtgggcatcaagcaaccagaagtgcaaacttccctccctttacttctgttgccttgtgtataaaactgcccccagcttgcctagagacgttgccttcatcagagaagactccattaattcagtgtcccaatggtgtcctagggaggcagcagacgtttcgtttgtcctcagtaagagctgaatccttaaaaatttaagaaactactttcagcttcctgctccacccctggcttgcaagccctctttttggcccctattgaggatgaaatgtctctcatttagtataaacagtaacagcccacggcagtgtgaccttctaaacttcagcgaagtcactggtggctttaaataacccagcgttgttcctccacacggctttggtactctctacctcttaccgagcaccgcccttttgaccttgtatagccagtttgaccatctgccttatagacaaacattgctgttcttctatgtcgtcctcttgagaaagctgcaagggtttacctctttccttgactctcttcttatttgtaatactctgagttctgcatctgtctcagacaggagctaccaaagggaaactgttgttcttataagtgtcttactttaaatcatgataatagaatgtgcacagtagctgaattgtgttatcaaaacaactctgacttctgcccagagcacattaaaaccaaagtctgattgttaagcctttgactcggatgtctgtagcagttctatgaaacattgcgtgtaatgatagggtaaagagatttctatagaacgaatttgggaggccagtgagatcggctcggcaggcacaggcacttattgtgtgaacctggcactgggtccagtctccaggacctatctaaaagatagaaggaaagagccaactcccagagttgacctgtgtcacaccagataaccaactgcactgctgaagttttcacaagtggagtgttgaaggtgaatcagtagtctttggagtctacaagtgactgtcattttaagcaactcattaaatattggttcattttttttccatgttgtggagacaccaagatgaacgcagcatgaatctcatttccatttctaagcagctgggtggtgcggcgattctttagttcctgttttgttttttttccttttcaagcgctatccacatctgaccacaggctggagatgtaagcagggatctcggcagggaaacaaacccgagaggacacgtgggatttcagcaatactgactgtgaagtaggcctgctcgagaggccgccccaaaggagaaggaaaatgacaaaaaaaaaaaaaaaatcccacaaaatcgagaatgtatccccagaatcagtacagccagttgtttgaacattcttaaagtatctcgtggtataatttctgttgacttcaagctttaatttggatccacacctacagctgacccaaatgtctcctctgtagtcatcttatttggatcagggagaagcatgaacaaaaatatgttccagaaccatgtgcaagctctgtaagtcactgcccgtgtctggatgaagggctttcggaatgtagatggtcaggaggtgcatgctgctatgtgaatcttaaaactccctgctggagggaggaggctgctacattcctctcgttctgtctcacacactcttcctccgagtttgtgtgtctagaacttggatgtttccataaggaaaacagaactgtggtattgtttcgagaagaattaagtaaagtttaatctttctgaactcctgacttactccagtacacaatgccaatcgctgcaccatttgatgtgcatgtttcagcccctttcattctaattatcctatttcaagtttatggtaagtcacagatgttctcccagtagcaggaccttgtgctaaccacaaactgcaccttctcagtactcacaaccccgatctgcaaggtatcgttaaggaatgagtatcttcagtgtggcaaaggagtagtgtagttccctccacaggccctgtcgtaataaaagcctcagtgcagcttcttcctgcagttcacatcttgatgctaggatgctcctggtactaactaaacattggcagttcacatcccagacaccaggggtcaggtactaactaaagagatggaatgcagtgtgctttttgagacactagggggagcctggtattaactaaacagcttgccattcaacagtctcaggagggttcttgtactaaacagatgggggttcactctaggtcataaatacaattacctactaagtagcaagaatgcctcagcaatccccaagccttccagtgcctctgggggcttcctgatggaaaactacacaaactgagttttttaaatgttaactccacttaggcttctgttttcctcatatcctatttttaattacttccaataaatcatttgctcagccttctagcactgtcttcctttgtatttgtcagatttatgatgcattgtttcagtctacccttaaagaagtcaagccaaaaatagaggtgagggctactttgcttcttaatgtaggcctactgtgcacaccacacactctctctgagggactgtagctattagatactgtcctcacaccctcgagctaccagccagggctctaagttgctctcgtgatcttagttagaaatacaggctacagtgtttggtcagaatttattcgaatgtctttatttttaataccaacatcagcataaatctatttttgctagtagatcaaagctattttcacacgctctgttttctatcttgtatcgatcctgcgaatcagtgattatctttgttggaaaaccttatcaaatgtgtctgcaaatcaagatggtctaaagtgcaagccagttttttgtttgcttgtttttgaaactgggtttaggggatacagttgtcagaagtgactcattcgcttcatttgtgatgatttttttttaatcttcctctgttagcccacaggacatgttttggggaaaatgatacttgtaaatcttctatttaaccatttgtaaaatctaaatcataccccactccccactcccatttcgattctccagcggctccttttagtttgttgtcttgccctactgtgtagctcactgactgagaataaagaatacagcaa

SEQ ID NO: 941 - protein, 853 aa, Mus musculus
MSDEKNLGVSQKLVSPSRSTSSCSSKQGSRQDSWEVVEGLRGEMTYTQEPPVQKGFLLKKRKWPLKGWHKRFFCLEKGILKYAKSQADIEREKLHGCIDVGLSVMSVKKSSKCIDLDTEEHIYHLKVKSEELFDEWVSKLRHHRMYRQNEIAMFPRDVNHFFSGSSVTDSAPGVFESVSSRKRSSLSKQNSFPPGSNLSFSCGGDTRVPFWLQSSEDMEKCSKDLAHCHAYLLEMSQLLESMDVLHRTYSAPAINAIQVPKPFSGPVRLHSSNPNLSTLDFGEEKSYSDGSEASSEFSKMQEDLCHVAHKVYFALRSAFNSISVEREKLKQLMELDTSPSPSAQVVGLKHALSSAQNTDLKERLRRIHAESLLLDPPAVPKPGDNLAEENSRDEGRALVHQLSNESRLSITDSLSEFFDAQEVLLSPSSSENEISDDDSYVSDISDNLSLDNLSNDLDNERQTLGPVLESSGEARSKRRTSLPAPGPNTSSVSLWSILRNNIGKDLSKVAMPVELNEPLNTLQRLCEELEYSELLDKASRIPSPLERMVYVAAFAISAYASSYFRAGSKPFNPVLGETYECIRQDKGFQFFAEQVSHHPPISACHAESGNFVFWQDVRWKNKFWGKSMEIVPIGTTHVTLPAFGDHFEWNKVTSCIHNILSGQRWIEHYGEIDIKNLNDDSCHCKVNFIKAKYWSTNAHEIEGTVFDRSGKAVHRLFGKWHESIYCGGASSSTCVWRANPMPKGYEQYYGFTQFALELNEMDPLSRSLLPPTDTRFRPDQRLLEEGNIEEAEVQKQRIEKLQRERRRVLEENGVEHQPRFFRKSSDDAWVSNGTYLELRKDLGFSKLDHPVLW

SEQ ID NO: 942 - DNA, 204182 bp, Homo sapiens
  misc_feature (1)...(204182): n = A, C, G or T/U
taagaagagtacccacgtgaggtactccccggggttcaagctccttaaagtgacagttgcttgtggttcaagcacacgctagctagccttcagctaaacacaaatggtcaatgcagcgaagaatgttcagcctcccagagctcagactccttcatcctacggagctattatgattttccatttctgttagttgggaagaggttgcccaggtaccatcctattcaaggaatacatggttcagcttactggataaacaagcagtatttctgactcttattggttcaatgtatacttattgtccacttcctttagaaatgtggctctataatgtgggagaggatggggtgagagcaacaggctccaacatcgccacagcaacaccagctagcacaggctcgaggagagcaattttcagagccatattcatggcacatcttttaacccagtaactccactctagaaatttccctaagaaggaactagtgggcaaatagatacttcactgtaacatgattaaaagagagatcaattagatttctttgtgaaagggaggtttattaaaagtgaaattactaaaaaataaatttttataagtatcttcctttccttaaggacctacctcagctgatcatgttattgctttcaatccctgtaataaactgtgaggcagctattaggaatttcatttttaaaatgaagaggcaaaaattgagaaaggttaaattacttgcctaagatgaaagaactactaaattgaaaaaatagtacttaaacctagtcttttttgtattcaaacttcagttatttctgttatggtacaagttaaattgatattatacatatttttcagggctttttgtagtcttcatgatgatcatttgaatgaatatataatattgtattgataatcatgaaataacaattaggaaaacgtatataatatcaaatcagaaatataacttaagtgtgtatttactctaaaaatacaactacatgaaaaaatattagaaggaaacattgaacaataaaaatagcttttttgtaggtagcattataggcaattttattcattttctttaacttctattactattattattaatattattttagagacagggtcttgttatattgcccaggcttgtgtgcagtggcttttcatagacatgatcatagcccactatagccttgagcttctaggctcaagtgatcctcctacctcagactcccaagtagctgggactacaggtgtgtgccaccacgcttgtctaacttctattgttttttgtttttgctattgttttgatgttattttgtacacagtttcttttgcaagaaatactggggtaaagcaaacactgaaagatcattcttttggaatcatcagactttcttccccatctcatagtcctagcaagttgcactcaccttgaggaaggaaaaaaaaaaaaaggattatataggtattgatatgtctcattctaagcatatactcttcatagacaagtttatttttggttacaggaattcagtttattatcttaacagtctgtaagaacaagagcaagatagtcacagtttcttccctgaagtaccaatttcatctgagtgtgatattccaattgctgtggatcagtagggaattgcgtgtaagaaataagcatcagggaacagggcactttcttttgatgaaaccacaggttgaaaaaagtttttcacctttgtgctagcctttttcatatctccacagtgttgtttaaccagcaatatacggaatgtcttttatgtgctatgtgaaaggaggacacccaagaagaataagaaaaagagcttataatttagaaagaaatataaaatgggcacccaaataaatatataataaatataatatgaggcatcttaagtcacatgagataccacaacataatgcgaaaacacaattttcacctttgtgaaatactctcaagaattatcgtgaaatgactcttacatacaattccctactgatccacagcaactggactatcacactccacagtgttgtggagttaagaagaggctaacacaaaggtgaagaatttacttcaagtaaaggtaacactatacacagacatggaggattcctagtttccatttctgtaaatagggaaaggtctatgtgaacccggctatggcaggatggaggcagccaaactaagcccacttctgccatttcttttgatacatttggcagagttgatgtggacattttaaggaataaggaaatatattgaaaaggaaagggataaaataaaaatcagttaacttatgaccttggcaaaatagcaactttaaaggaggcagcatctttccgttgtcaagttgctacaaaattatctctgtgacctgaacactagcacattaactctaataacatctctgctcactgggcctggaatgggcatccacctcccatctccccagctccagccaccattcaagtttattctttgggattctgtttattcattcaacgaatatttgaatgcttactaggtgctaggtattgagacaggcactgagagtgtgaaagttgtcagaatcaaaatggagtcatttgtgttaaaaactctgacaaatagaggtggggaaagccatgaagggagagttcccaggcttgtatgcctgatacccagaactgtccccaaagactctgcagaaaccacaaccttgcacaaaaaaatacctctgcaagggtgtctacccagcaactgcctgtccaacctcaaactggcaccacctttgttattgatccttgaagccaaggataattatctcagaaacaattaatgtaatgctcttcacttttcccttaaaagcctttacctccctgaatacacacataggtgactatggcacacatactcccactggaatgccctatccatgaataaatatcattttcttttagagagcctctctgtttgttatttaggttggcaggagactaaaaatatacatgatcttcacgttgtggagcctacaatccagctagaagacagaaattaatcagaaaaatcacaaaaaataaacataatttcaactgtgataggttctaccaaaacaaacaactcctccacacccctccaaaaaaacacacaacttagtttcaaccagagcaatgataggctgagttgacctgactgtgaacgtcaaggaggacttcccagaggaacagatgactgaaggaggtctgaaggaagtctgcgttaactaaatgaagagaaaggaacagcatattccagcagagagtggggcaagtttgtcccaatgccccatgcctggaaggaacaaagtcctggaagcagatcaatgtggagaaagggaaaggaagaagggggaacttgacacaggatgaagctggttagatgtcagaccacgtggaacgttgagaaccatgtaagtagtttagtctttatcctaagagcaatgggaaactgtggaagatgttcatgatcagatttgggttaaaaaaaaatcactctgggccaggtatggtggctcatgtctgtaatcccagcatcttgggaggctcacgtgggctgacagcttgagccctggactttgagaccagcctaagcaacatggtgaaaccccatctctagcaaaaaatgcaaaaattagacaggcatggtggtgtgtgcctgtagtctcagctactcgggaggctgaggcatgagtattgcttaagcctaggagtttgaggctgcagtgagccatgattctgcctgccacttcactccagtttgtggggtggagtgagacccagcttcaaaaaaaaaaaaaaaaaaatcactctggcttcagagtagagaagggcttatagtaagagcaatggtggctcctggtctgttgcaattttccaggcaagaaacgatggtggtttatactacagtggtgatgttagtggatatggagatgggaaatgaaggggaattcacaaaggtcttctgggttactctataaaaaaggaaacatactcgaaagcataacacataacgactttttctgccaacatatttgttggagatttggaggaaaatatatggtgaatgctgtggcttggatcactcaacttctaacccaatttccttctaatatgcttttctatagtgtagaggccagagagataaaattgcattgcaaatcccccgcagttagatttgcagatgtggtttagaaggtaccaacccaatgcacttacataagacatgaattcgggaaagaggtaataaaggaagaagcaggattcaaagcacactttttgctggtgtggcttgtaacagaaggagtagggttctggcaattctgccaaatctttctgatttgacaggcggcctcctaatggtggcaggagctatggcaattggcagcccagtttggcaatgcctggcacataaatgcttaaaacgcatgggctattattattacacttaggatatacagcagataataatatagtatgtctatgtgctacagagacagaaactaaaggataattaaatgctcaccgcaaattctgaggtagttcagtcgtgaagggaatattgtttcatggtttaataatgtgtatgacattggtgtccctaagcccatgttatattcctttttacaagtagcctatgcttcacagtataacatgctaacaaacctgattctgtcaaatgcttgggagaaagctagcctgttgaaaccaaaggaggcctgggtgcagtggctcatgcctgtaatcccagttctttgggaggccaaggcgggcagatcacttgagccctggagtttgagactagcctgggcaacatggtgaaaccccatctctacaaaaaatacaaaagttagccgggtgtggttagtggtggtgtgtgcctatagtgccagctactggggaggctgaggcatgagaatcacttgaacccaggagtcagaggttgtgacaaaccaagatcacactgtggcaagccaggtctcactaatgcaggcctccataacaactgtttcagtactgactgagtggataatttaaatattaaaagccagtgcccttatacaaaggctgaggtgtaagaaaagcccaccaagagttttgcctaggcctttcctgggacttaaagcacgacaaaataatgaaggaattcttaacaggactcatttaggattaaacaagttttattgtgggtctgaagaaactccccaggcttccacaaacaagcttattgggggggttggaaggaactccccaaacttccatgctttagcaggagacaagataagggtaatcattccagcacctggacccatttagattaagtaaatttactcaggctccagaggaaggtcttcaggactcagaccttagttacagattaaaagaagttaattacttatgtgttagatgaatgcatacttacatgtagacatataacttaggaagtatataagctctggaaaactttgtaatttggagttggtctggcgatgatctccaggccttctccccgtacccagttgcaaaaataaaaactcttttcctccccagttcatctgcatctcattattgggccacgagaaatagcagcccaacacttagtttggtctgggaacaccaccacggcactccagcctaggcaacagtgagatcttgtctcaaaaaaaaaaaaaacaaaaaaagaaaagaaaagaaaggaaactaaaggtgagcaatcttcctctagaatgtcccagaaattgtaaacagctgatgaaaaacaatttagaattagaataatctgtgacttttagttgcactgatcgtattgacttaaactaagcaggaaatatatctgaaccaggaaaactaacaatgttgcaacttcctctacaaggataactttactgtaataaatacatttttgttcaaaagttaaaaacgttaacaaagacatgcaggaaatggctctctgctcctaattcccaaaataatttctctctgctctgaacacatttttggtacctcttaggacatcttccattttttagcttgtgttgtagttatttatgtccacatctgatctgcccaatatagaaaactacaaaagcactgaagggacactcactgattcatttttattcactttaaagtgcttgctaagaatgatcccttacacaaagcaggcaatctatatttaataaaggaattggtgaatttttgaacaatccttgtcaagaattatactaacagttgtaaaagaatgcttacaaggtgttcatatgcaactaaatactttgattcatttttcagataaaagtgaaggaggaagaagatgagtagggctgtacagggtggagagggtggcaactctgctttagacaagtgcttttcccactttccataggcagtagatgtggcaaaaagatggctctttaagaggagacttagcctctgaccattcataggctgtatgattatggtcaagacactagcaactttctgggccttgctccgccaccccttcataaaagaagttgatgaagtgataaacaatagttcctcctcacttgtaatcatatcagaagactgacactattagggatcttaaagttcatctagccccagaatggcaattcagcattatcttacatgctgatcttggcctatcagtggcagcttcttgcagtgttgagaacgattctgaggctctatttggacttagcggaaaaggcagccttgactgccataatgatgtctgctacaaggcgggaggaaagtggcagcaaataagtcaagatgtgtcatccctaatttagcccaatgccttctcttcacaggaaaaaaatgagaccagaagctcgtcttttgagtttaccatgtgccaggcactatgcaaattgcttttacattcacaattgtatttaatccttagacaactttaagaagttagcattattatcattcctattttacagatgaggcttaagaaaacaaaatttgcctgaggttcacaccttagaaacccatatccataagcatttccctatatcgcctcctgcaggcacgtactatgtgttatgccagtggttctcatcaggggggattttgccctccagaggacttctggcaaaagtctggagattttttgttgttacaactggggaggacagggtgttccttgaatctagtaggtggaggccagagatgctgctaaatgcacaagacagcacccccccaacctttacctccagcaggaaagaattatctccctaaaatgttaatagagctgaggttgagaactctgcactagactatgcggaaattgtttgcaaatggatgatcaaactcttcctgtagtccagcagctacataaatatctccattttacagacaaggaaaggtgattgcagaatcaggtggtcatcacaagacaggaactgaggtagtctgattctagaggccctcagtttcctttactatcaaaacatgcaaactcaagtagcacccgcttacctattaccaatttcagaagctaagaccactgtgtcacatgtgaaaaattcccactgtggtgggcttgtctccaaagagaaaaattatttgttcaacagttcaaagaagagggtctctaggaactcttaatatggaaccactggtctttattagacattcaaatcgttattttaaaataagacgctgaggagaaagctgattttagaacattaacaaactttttcaagaataattagctctgcgtgggtttcaacttttatttttattttttccttttgattttaggagctggagagcctggaagtttatttaggagtagaagaggaaatgaaactatgaaaagccacagtacgattcctcctttacttggagacaaggcacaatgtgaataattctctcatcctgtccaattaactgcctcaagtacacacacacacacacacacacacacacacacacacacacacagagagagagagagagagagagaatgtacactctattattatttgattaggaagacattaatgaaaaagctcggaacgggatgctaaacaacaaagccctatgcaaatcacttcctttcggattgaaggcttgtctcctacagaaaaaccaatgctaaagaaacaggcggagaggctgaaggtggagagcaaaagaaaaagaaagaaaatagcttgaacgaggaaagggactggcaggaggaggacagagcaagcctctctcagagagaaattacagaaagacggaaggaggtttgggaaaacccagtctaagctgctccgacggcggggctgggcgtgggcaaggtgcctccttggacggtccgcgcgcctgccagacgcgtccttccactacccgtccagccacctggcgctggtcgggctttgcgaggtggtttaggaaccgcggagtcattcgatttgaaatcttctccaataagcttctccgtgtgccgacgtgggcagcatgacagtggatttgctcggcagcatctctggcgcctcccgccctcgcccgccgcctgccagatccgaaacagacagtcccagacatttcgcgagggggatggttccagaaagcgaagatctgagcgtggtgaatgaaatgtgaacagaatagctccggaaagagtctcagaaaccttgaattggggtcagtttggagactgaaaatgcgtcgagcgctgcaggtggtggttggcagggggatttaacactgtggagcccttactccgtcccaggcgctgagcccagcgagccacgcgcggtgcccagctcggtgaggtcggttagttgggtcttcagggaggctaaataccctgtatttgctattcccttcgcctggaacgctctgtgcgagactgggtgtggcagctcctttcccaggctcaggaatctgggtaaaagccaccctcgcctagaggccctcagggtgagcgccccatcacgcgctaaaccactttcgaaagtggacttggccctcctctcagtactaacagtctgtcagccttttattttttgcatagatatgtattttctcttctttattgtctgtctttccacaaaaaatgcaagccccgtgagtactggagcctggtgcgcctttctcacagttgcaagctcgcaactgctcctggcatatactaggtgctcactaaatgctcatgcccttcccacccgccacctgcggcactcgacacatttgcagtctgcaaactgaccccaaaccatcagctgcttgcattcgtcctaggatcaaagaaggccattgggctagtgggaagtcaagtcgggtggacttttccgtctttcagggagatttaatagtaacgacggtgctctccccacctcctacccccttgcacataaactgcacagaacaaaatcaccccggcacgaatctgcacgactgcctctggaggtagggtcacggtctccgagccccgggtctcacactgatgctgtcctttgtcatctcgtgcctagagtgctgcctccctatgtatttcctctgttctcgactcctctgccacagtctgactttctcgggaggtcgagttctcctagcctgtgcgaccgcaagggtcccctggagccttctccgtaaacctgcccctcccgcgctgccctcactttttcctccttccctggcccggaaaagccactagaggaacatttaccgaacgcctaccgcgcgcaggcaccgagctgggccaccgggagccccacccagtgcctcgccgcaggactcgcctccctccgccctcccaacccatccggaatccggggtccctagttcccccgccgcgtcatggaatccgctggcttcttccgaggacatcgccccacctcctccccgaaaggcgacttctgattggtgggattgtgcatcactctgccgccctcccgccccctcggggccccgcccctgggcctctcaggcccctcccctgcgctcccgcccttgcgcggctcctcgggctaatcgccgggcggcgcgcgccgagaagttctgggcaaagtactcagaactggccgcgtgctggtggcgcccgccagccggcccgggagaggggacttgagcgcttcgcggccggtgcgcagcgcggctccggccccgcagtctgtctgcaagtggccatccccgcccccgactcctgcggccggtgcgggagctgtcagctgcacgttgcgggggtaccggagaagccggggttgccttctcccggttctgtgcgctaaccccggagcccggccccggggaactagggagcgtctccggctgcacagcgctcaggtgagtggcggggcgcccgcctaaatggggcctgggtgtcggggggcctggcggcggcgcgggctcggaagggctgctgtttgcggggcgccgcggttctctgccggaccggggtctgtccgagtcgcccggggaggctccggccctggggcagacccaagcctgggagcttgggtgccggctgcagctcccggggaaggaggacccgggtctcacccaccccaggacaccttccctcgagggacggctcagaggattgaccgccaggaggagccgagcgcaggggccgcggcgcaggtgcgggaggacgcggcgcgcggagctgtcctgggcagcggggaggcgctacgccggggctagaggctcaggaagcctggtaaattggggcgagcgcgaagctttaccacatccgcgggatggggcgcgccggagagactgagacaacgctcgcggggcaggcgctccgctcgcccgccttcccaaccccggcttgctcagctccccggtgctgggctggaggcccagggcacattcctttcttgtctgaatttacatattcatcagctttctggccccttctggaatttttttttttttgttagtttccaattactactgttcagatcaccttcaggctcaccctaactctcgtctcagtgtctctcacattggtcctttcctggaggccctgcagcgtcttagttcagggtcttagggacttatgcactctgtctgaacgttgtctacagttgggttttcctacctctgtctctgtttattccgtggtcaggtaaattctttaagtactgtcatcataagccagaaactcccaggcagcctcttagcgctgcccagcttcccggggagcgtttgtggcctctggagtcgctgatgggcactgtcgcaggtcgtccagatacttcttaagcaggggcgcgccgcccttccttcggcaacgcaacttgcttgctgccttctgcacacttgtgcttgtccttctccgcctcacaagccaccagtctcctcagtcgggactcttggagctgaggggactgtgaagttgtcggtttccatgtgtctgcgtactgcgcagaggtgcttgagaccccctaggtgttgctctgaccctcagagtttgagtattgggatgagggcatttagaaatattttaaactacagctgcaaaagagatacttccacagatgggtgaaagcgaaggcctggcttctcatcatctgcactgtaccccgcaagtatcatacaaggtgaggtccttggctaaaggactatacttggctaaaggagatcagtcaagcaggcctaggttcttatgcatccaagctaaatgaccatcccctccagccaagccacatcacccgtttgctgttgctcatagcacttaaatttctctctgaaattgtctctttgggttattgggttatctgccttccctcattaggatgtaagtaccaggaatgcagagaccttgtctgtcttgttcatcacttgatcccctgtgtcaagaacacgcagtaggtttgcaataaacatttatagaatgaataaatgaaaccttctctgtaaatatgaggaatgaggatttcatagctgattttgattttcatctttatcctttttttactgttgggaaaattaacaaatagcaatactaggaacttttgtacattaccgcattaaacttacagaagtctgttagctaggtatttttaaccagatgggaaattgagggtccagcaggttaacctgtgttgccaaggttatcctggcagaactaggattccagcccattttgtctctattgtgcttgacctcttccaataaactaaaatgtggtttccaccattagttaataggcatttagctttatttgtatcaaaagctatggcttagccaaaagatttactgttttattattgagatatattttcagtaatcgttaatagttacatcataagccagatactcccaggctgcagtaagctgtaattttcttttttcttttctttttttgagacgtagtctcacgctgtcgcccaggctggagtacagtggcgcgatctcggctcactgcaaactccgcctcccgggttcatgccattctcctgcctcagcctcccgggtggctgggactacaggcgcccgtcaccacgaccggctaattttttgtatttttagtagagacggggtttcaccgtgttagccagggtggtctcgatctcctgaccttgtgatctgcccacctcggcctcccaaagtgctgggattacaggcgtgagccaccgcgccctgcccgtaagctgtaattttcaccgtcttgctgggcattgttgtgaggttatctccatttttcaggtgaagaattggaaaacgaggtttaggaacttgcctaaggtcaccagtaaattgctgagctagattttttaatagtctgacttcaattctcgccccactaattagatgttaactcatgatagaatccagtgatacaaatattaaaaccatctgagattgggctgtaaactttctggtgctgatatcaagtgtctagatgtactgttttcagaatccctgagactcttactgccattgatttttgtgcttgggtttatggtttgtgggcctgatagactggggacttttaatacagaaggaaaggaaatcctcctttcatctaaatctaaagagaaatctgatttgttttacccattgtggtaaatgaaccctgaacagtaatgctttatacctcttaaagaaagcgctggaaagccagctagttcctctgttctctaatgcagagtagagagttagaaactgctactaattccaaaagctcctgcagtaggctttcagtaaaacaactacatttcaactctctactcttacgctgacactgagggtgagaagttggggaagagtggcatgggtaccacctaaggggctcatggcaaaacagaggatggggaaggaattagtgattccttctttcttccacttcattccagtttgggtgctggtgtaacatttccccctgcataagagtctggataatgcagttttatttataatgtgcttctcggcagtactgtattttcctatttgttaattctatttcagtagtactccagggagggttggagaaccctgcaacctagaatgcctgaggaagagattgaggtgtaggatactagggaagatggaaactgttaggtggaaaaagtcttccatgcataattgagagttgtttatggttctctgcacattcctttcctgtctaaatttacacattcatcagctttctggccccttctggaatttttttttttgactttccaattactactgttcagatcaccttcaggctcaccctaactcttgtctcagtgtctctcacattggtcctttcctggaggccctgcagcatcttagttcagggtcttagggacttatgcactctgtcctaacattgtctacaggtgggttttcctacctctgtctctgttttttccatggtcaggtaaattatttaagcactgtcattatgttgttaaaaattcttgggtggcttacatagtgaataataacattaataacagtagtaataggtgctgaacttgtatgtgccgggtgctgtcagaagttcctgtacatgcattattgcatttaatcctcagggcaatatcaaagcaggcattgttattatatctccagtctccagatgaggctaggaaaagttaagttcacaactgctttgcaactaacatatggtggatctcagactcaatccccaagttattttctctacttatttgcatatagattccttagcctaaagtcacgatccagcagactgggctcagctttggcctcatcctatcattccccacccctgtgagctggtagtctgagttttattaatcaacaaagcgttttgcctttgtccatgcactcctgttgcctagaaagctctctgttctctccgtgtgaaaacctaagtctttcaaagctgaactcataaactgcttttgtcagcataatctctctaaacccaatttcccagatcatttgtttttttaaaatatgagaaacttcccagttcagtttctgatcacaaactctgttgctgatgtccttccttccttcagcacttcttaccttttatcttcccctattcctctcaccctgttgcctcctgtgctagtaatgtattcaaacttattgcctcccttactagattttaaatgccttgaaggcagggtgagtgtgtattccttaggtttctattcctcacatcactaaacatggtgtcctatctatagtaactgctcaattgaaaaaagtattaattatatttgcttaaattttgttagagtattctgtgaaaagttaattggaatgtgacattttgttttctagttttctgatttgttttgatccacagtattttatcattttatgatgaaacaacgaatatgccatcatcattttatgatgaagcaatagaatatgccatcatcattttatgtcgaagtaacagaattccttgttaagtccatgaaaagcacctgttctggttgctctcatctttggaccaaggagatattgcaaggagatctcaaattcacacatgtagtaatcattgtctgtagaataaatattttgcctatgttatgtactattttttcatatctacggtaatgctgttactaaaaatgtactaaaattgttatggaattcaaatggaatttttgtgaatattttatggatcaatgaatatttcacattttaaagcagatttgaaagaccctttctgaattggctcctgcttccctgtctagactcatagctcaccactcaccattgagacacaattcacatattatacaagtcatccgtttaaaggtacaaaatttaatggattttagtatattcagagttgtgcaaccatcaccataattttaaaacatttatcaccctctaaaaaagtttgcacccattaccagtcattccccatactgcccgtccattcccctaatccccacccactaatttactttatgcctgtatggatttgcctattctagacatttcatataaggggagtcatatagtatgtggcctttcgtgtctggcttctttcacctagtatgttgttttcaaggttaatttctgttgtagcatgtatcagtacttcattcctttttattgcctagtaataccccattgtatgtatataccacggttttatttatctatttgctagctgacgggactggcatttctaaaaaagtttgattctaatgtgaccctaatgtgtagtccagaagttcctttgggccctgttcgctgttttatcttggggctagaacagaacctggcacaagatagatgcgtaataaacattcagatgactgcagcattttactaaaagtgtaactcctattatgttgcagtcagcaaaatgtgttgtcgttaaaaagaggtcctcatagttgatggtttacctactgatttgaacaaacgaactgttaaaaagagtcaaggaactttgaacatggctgcaatgctacagtttttaggatttgctttgaaataatctgggggtgaggagggagtacagaggaaacaaggctgtccgtgagctgacgatcgttgaaactgggtgatgaattctctatctgtgctgtctgccaggcagccgttggtcgcatgtggctattcagcctttaaaatgtggctagtccttactgagaagcgccgtaggataacacatacactgagtttcaaagatttagtatgaaaaataatgtaaaaatacctcaatttttaaacatcacgtgttgaaatgataatattttgaatatattgtaatactgtgtaattaaaactaacttgttttcttttactctttgtctacttaagaaattaaaattacatctatggctcctattacatttcagctgggcagtgcagtgctatacttttgtacatgtttgaaatttttcatcataaaaagtttagaaatatcaaagtcatcttttttaaagtctggagtataatattttttataaaggattcctctggtatgaaaggattgggaaatattgatttttttcaaagatgcttctttgcagaagcttgtgcaggcaggctgtagccttccaatatcattcctgggcttatttaagctatgtgaacatttaaaaattcttttataataataaatggaatagcagtgtgaagaattgcttctttagttattaatctaaatgattttgttttgaagttggtgatatatttccttcatcttggaaaaatacagaagactcactggtaatttccttgttcttagccacattgtttgtacccctgaaattgaattttctctggacttggtttataactgcctctacctaagtctgttgtttgagagccagaatatggttgtttctagatgctccaagaccccttgagtatgagtggaatatgattcttagggaataataataatattgtgtgggtttaaagccaagaagcaaatttctttcataaaagtttctttagatgaaaattatgttgctgtctatatgtctgtgtttacttatgaaaaaaatatctgaggtaatcagcccagttctctgagtgggtgtgggctggatgaacaatcttagtggaattttcatctgtgatttctgagattgtgtgagagtagatctgagttaaaaaaatagcttaaatgtaaagcagagcagaatcaaattgcaatgagcaatccagtgtgggattggcagaggatctctgacagttactataactaaagtttgctattttgtttaccctctacagttaaaatactaaaatctttatttttagtattgtgtgggtcagatactttcctcaatgtaacatttctccaaatatgtattaaaatgtagtacttgtaaagattcccacactggtttcctgtcttgatatcaaatattgtaatagttacaagaactttaaaattatagtttacatcttataaaacaaatatttctccctccccaagtaatttgtggtggacagtcatctgaaatgtttagaagctaaagctaatatatatattttaatctacatatatgtatatatatgtgtgtgtatatttatgtatgtatatattttttaatctcagcaactcttattaaatttgaagtagatgcctccctagaattaaagcatgcgctaagatttttgctcatacgtttcacaaatatttattaagcacatgccatgtgccagacaccaggctgggtgcaggggatgtggcgatgaattgaacagatgtggaacctcccttcaaggagcttacagactagaaggggatatagacattaaagagttgcagagaattcattaattacagtggggagatgtggctcaaagggaatgagtctggcttttaattgggaccctggagagaaaggttccatttttctgtaggttgtgattcaggttgctgaaggaagagaaaagagaatgtggctggggaatcctcaaaggaggatgagatgagcagagtcctgcccttttgtgtctttctgccattgctggaggccatgtagaactgagtgggaggaggccttaactcctcttttgatttgaggttttgaatttctctctctgatgcgacacacaggtttgtttatttgctaatgggagttgaatccaaagttgagtttttaacacctttatagcagaaacgcaatgatatctagcaacctgtcctccagcatagccctgcatgtagcttaaaataacttgctggctagattctagtgtagcttagttgtctggcatctgaggcaaagtgggttaggggtatgtgaagcctaaaagaatacagggaagcccacttgggtttttctcaggtgtagggctgcttcatgcaaattcctggcatatatagaattaactgaggtttccttcggagcttgttggagctattagggaatgggaaaccatccttcctttgaaggtggaggtaattatgaataacagtgataacagtggcagccagtagctgttgggcgctctccatgtgccaggctaagttagatcttatcacttaggaagtggttactatcattccagtttatcactgataaaacagaggctagcgagcagtcacttgctgtttggtttttccaacatccctttacccttcctgatttccatttgagaagtcacttcttgcctttggatatagtctgctgggaccagaaggaggggccccattcccctcagctgtggccctgtgagccaggtcagtcacatgcctctctctggactctgggtgtgggagggtcatggagagtctgctgcgagatgtgtcatggccagaccatctgtgcatacagctttgttgtggtgtagctttccattccacggagctgtgcccgggcttgcctctccagcctcctcttagttccttgaactgatttgttttctaatacattttctttggcttcatttaccaaattgttttctgttgcttccacccaaagaaccctggttatccaggcttagagagggcgaagtagttttcctatgatcacgcacacagcaagtggcagaactggggtacagtcaggtctttcggcctctattgccaagcccttgattagagaccccctctgtgtgctgaacagcactggactggcagtccgaggatcagaggatggatgtagttcctgtggtacctgcctctggggccttgggccactgcctctttgagctggacagggtagacaggatgaaatctatacataactaagtgacacccagtttgagaggattttcttgtccatgagacttttggacacattttgccccggttttctaaaggcttttactttgaggtttgaggaacggtctgaagcagtggttttcaaagtgtgactccaggagatgtatcagtgtcatctaggaacttgttagcagaacttgggtggggcccaaacccatggaattggaaactctgggggtggagtccagaaaactggttttaacccttcaggtgattatgatgcacactaacgttttaagccccagacattttcgttttattaaaaacaatttattatgtacaaggtgctacctagaagtagggagcaggcaaatgttaattagccacagccccgacctcaaagaatattcacttcagttcgggatatatatgtttatagcactcctccttctctctacaattgtgttttttatatctatctatctgtatctatatctctatatattgatccatcttttctctacttatataaacaagatattaaagtgctataggagctcaggaggagtgagggagatgcttttgcagagaagttgagtgtttgagacacatcttgaagggcacatgggattgagataaagaaagggatgaaggggctgagtgcgatggctcacgcctataatcccagcactttgagagactgaggcaggcagatcacctgaggtcaggagttcgagaccagcctggccgcgtggtgaaaccaagtctctactaaaaatacaaaaattagctgggcatgatggtgggcacctgtaatctcagctactcggaggctgaggcagaagaatcgcttgaaccggggaggtggaggttgcagtcagccaagatggtgccactgcactccctagacgacaagagcgagacaccgtctcaaaaaaaaaaaaaaaaaaaaagaaagggacgaagggaaaggtaggagggacattctaggcagaagtggtaggttagctaggatgaaacaaggcatgacattttaagagttggtggactatccggtttgatgaagagaaggactgtgtaatgggaaaagtaaatggagaggtagattagggcccaagtggtataagtcctaaatcccatagtaactccaaagactatgctgtaaacagtgaacaaggaggtgacacggtaagagctatcttagcagaaagtgttttggtggtgacagagaagggcagaggctgggagtataggcacaaagtgatgagacctgaactgggatggtcacagtgagaggagaaaaaagacaaataatatcaaaatactggaaagttagaatgatagcccctaggaactaggggttgggagtagggttgagggagaaggcaaagatgattccacaagggataataaatggtgttggtaaaatcaggcaaaaaataaaataaattccacatggatcaaaactttaaaacaaatagaaatacaaaaaaatacaatacacttttaataataagatgaaaaatcctttctagataggacacaaaatccagatgctataaaataaaagattgatttattgattacatatcatttttgcggggtcaatttttaaaaactatgtcaaaaggcaatcaacacatttaggaaaataattgcaatgcatatcacaaagacctacttttatcaatatataaagaactccaacaaatcagtacgagaaaggccagttactgtaaaggcaaagagtttgaacacatagttcacgaaatggcatacagatgactcataaacatatgaaaactttaacttcactcataaaaagagaaaatgcaaatgaaaacttcattgagatgctatttttcacctatcgggttggcagacatcacaaaatatgataacagtgttggcaaagttttgaagaaacaggtattcatacatcgtggatggaaatgtaaatcggtccaaactgtagcgagccattggcagtatctgtcaaaattggaaatgcatgcactctttgaatcagcaataacagtcctaagaactttatcctacagatatgcaaaattcacaaaatgatatatatgcaaaattgtttcttggagtatttgaataaataccagattgcaagtaacttaattttcatcagtaagtactaattaaaaataatagagccgttaaaaatgaggcagctctacattttctgatatggaatgatatgtgagatttattgtgaagttaagaaaaaagtgaagtatagaatatccatatataatatatattttatatgaatgtatgcatatacacatggacatatattcatgcatatatgcacacatggataaaattggtgggctgaggctggcgccgtggctcacacctgtaatcctagcactttgggaggccgaggtgggcgaatcacctgaggtcaggagttcaagactagcctggccaacatggtgaaaccctgtctgtactaaaaataaaaaaattagctgggcgtggtggtgtgtgcctgtaatcccggctacgcaggaggtggaggcaggagaatcgctggaacccgggaggcagtggctgcagtgagccaagatcacgccactgcactccagtctgggtgacagagggagactccgactcaaaaaaaacaaaaaaactggtgtgctgaagccagtttacaccggcatgtgggaaccaactgtgcgtgacttcccaagcccttggctgattacttcatgttggtagtttgaagccagccacagtgggagtatttacaccatggaaatcaggaaacataacacatgaggacatttttgtttttgtttttccagagagctggttgataaacatttaattgtactcactgtatatataaaaatataaaatatcttttgaagattatacaagaggttgctataacatcagactgtcctaggaaggggtaacggaaggcaggataggtgtgaagttgaaattataccttttgaatattattccaagtaaatgtattactccaagtaaatatataaagcaaaccaaaaagtaactgcagagtttcaggcgtatgtgactgtgttatttatggtgccattgactactgctggggaaaataggaagatgagtagatcttagagaaagagagtgcttttggttttgaatatgctgagcttgaagtgtatgggtggtatcagcacagacatgtccagcaacagtgcaagagagagggcagagctgttgatcagttctgggagtcagcagtttagttaaaattgtgacagttaagggggcctttacctatagaacctttggggcaggtcccaggagagaaagggggaagcctgtagtaccttggggaaggtaagccaagaggtaggtaggggaagggtaactagtcacaaagattggaggaccataaaataataataatggtagtttcttaatgaagtatttgctggaagtgagacactattctctgtactttttgaaagaacatcacctgatttaattctcacaatcattctctggggtgggtactttttccatgataaccgttgagttggggagggtaatgtcaaagaataaaccaggagagatctcatgggaagggtgttaatagagcaggaccttgaagtgtcctggtacaatttcaaaaggtagagaaatgggagagaaggacatttcaggtagaggggagtgatgagcaaaggtgaaaacagtgttatcccttgcagctgtagggtaagaattcatgggaacccaagggtggtgcatggctacttcatcctctggccattggagagccacagaatgttttgagcaagggaatatgtgttaatcagttcaactggtagtcaaatacaaaaattaaatgttgtatgattggaagatttctgtgtgtacactgtgggaaggagggatgataggaaacaggaaaaattaccataaaaatttgagataatgtagatgacctgtgaatacagatttagagtgtctgcaaacaggcattgtgatggctcatgcaaattcagtctcttaagctgaatttgcctgtgtggcagtgtattgcttatcttatgtattagtcacttaggggatgtttttcatatattttccagaagactgtgaatggggaataagcaaagtggcggtaaataaaaaaatgattatttgttgacataaatttgtatgtatgtgatttatatatgaattttgcctgggaaataatgatcagcctcatgaggcacaacaagcccagcctctttagagaggcgttgtgtttgtactagcagttcttttaccttataaacatacatatacacaaacatagtgtaaaactccaccctaattaggttttcagctcagtctttctctgggccagtgtcttctttaattttgttttgtgtgtgtgtcattaaggaatgataccaataatagggtgtcaaaaaggaaagactttggcctaaacatggctcagaaaaaggactgcctggccttcttcatgcacacctgccaatgcatcatacttctgacttgtaattcctgtttttctagtctttgatcgcgtggggcaaaataacattccagcttgtttgttactttgagttctgcatcatttgttccttgattaagggcctggaagccccacttgtttgtggcatccagaggtcttattttcctgggtgtgtgtagctaggtgtagatagatctttatattagatgactgccttttctgacccacagataagacacctttgtctgacagatgctaggggtcagaaggacaggatgtgggagtttggtttcttttgtaaaatgtgcagtgtgtggtctccgcaggtgctggatttctcttcgcggctaagaacttcccagtctggggaaaatacccatgttgtaggaagcgagatctgtgggtcttgctgtagctagttaactcaggctgaggtttagcaagtcatggacctcccacatccttttaacagtactgtttctcctctctctcagatgacttgtgtgagacttagccaggtgtcaatggatgtgaagggggtttggaggaaacaagggcaagacaacattctggctggacagggagccagctggaggggtggggccacatgaatgggacacacccttgagggaagtggttctaaacctcagcagtgtcagagtgtcctggagggactggtaaaacacttgagttgagtccgtcgcagtggctaatgcctataatcccaacattttgggaggctgaggtgggaggattgcttgaggttaggagttcaaaaccagcctggttagaatactgagactcagtctccacaaaaacaaacaaattaattatttaataaaacagattgctgggccccacccccacagtttctgatttagtgggtttctgatttaatgggacctgagattctacaattctaataagttattaggagatactgactctggttcatggaccccttagcaaatccaagcattggttcagcaggcagaagaccaagtcttaaccagcctggagtccattctgattccgagaagaaccagagaattctggttatcattagattgtcataacccccttattttatataacacttccacatttgtaaatcactttaatatatgtttcttctcacaacaaaataaccctgtgaggtaggcaggggatttattaaccttgttggacgactaaggaaaataagattgaagacagatgactgacttaccctaggggcaaaaatagttgagctcatacttatatctagattttcttactgtagatttattgctccttctacattgtcttttttccttggaaaatactacattttattcaaatgattttgagacaaaacaaaattagggagatgtagaatcctttcgctcatgcattaacagtaaatattttttgaagacataatacagagcacatacttattgttgaataaatgaatgaatggtttccataacttccctaactacttctgaactcatgcactttagtggcccagtagtctcaattacaaataataagaaaagcacaataattaattaatacaacatgcctattaaaaatacttcccaaaacattgcctttaaagctagtaaaaagcttagagatcatctgcttaggtattgctcaatgtttgtccaactttacttattttaatcacagcccccaacacaaaacaacttttaagtttagaatagttttagaggtagagaaaagatgtgaagatagtacaaaaaattcccatatgccccaagtggttttcccattgtcaatatcttaccttagtatacttttgtcacaattaatagaccagtactgttgcagtattaataactaaaatctatacttcattcagatttccttagcttttccttagtgtccttttgccgttccaggactccatgtggggttctacattatcttggttgccatgtctccttagattcctcttggctgtaatagtttctcaggctttccttgtgtttgatgacctcgagagctttgaggagtagtggtaaagtattttgtagagtatgtctccactgggatttgtctgatgattttcttgtattggactggggttatgggttttggggaagaagattacagaggtaaaatgccattctcattacatcatatcaagagtatatgttagcagcatgatttatagttttggttatgttgaccttgctcatctggttgaggtagtgtttgtcaggcttctctaccatatggttattttttcttcgcctttccatactatactctttggaagtaagttattatgcacagctcatacttaaggagtggggagttacactgcacttccttgagggtggtgtagctacataaattatttgacattcttctgtgagtcggatttgtttcttcttctccatttgtttattcaatcagttttttttaatcagtgtggatccattgatatttattatatactttggattataatttagtagtactttattttgtttctgaagttcgtccagctttagctattaggagtgctttcggttggctcctgtatccctttgatgtaagtccatccttgtggatttttttttagcatgtcctttcttttcggcactacaaggtactcaggctaatcttgtatagtccttgtccctcctctagaatcatttttttgcatgggtgatattggtcttgatccactaaattgatttcatcacccactacatggtttactacccacggtgaaaaacactaatctgtttccactcctcacatgttaaagataagaaaatagacacctcaaaaggtgaaatggtttatctaaggttacgcctctttggtagcaaatcccaggctaggcccaggtcctctgaacttgtagtcctgccccttttttaccactccatgctatgctggcagattccaccactcagagtctggttcagtgtactcccatctcacccagggtccttgtgcataggcagtcagatgcgcactcagccagatgtgctactgtctgccctgggcagatgtcagcaaaaaagggaaagtgggttggccggattcttggtggaggctgccatggtgagtctgtgttgcctggttggaatggtgttttgtcatggtgaaccaattacagacccacagagtggcactgctgacatcagcattttgcagctgtggtttgaccacatgactggcctctgtgttctggggaagttggcagaagagtggcttttagactccaacacccccttctttggtttctgttcctttccatgggggaggatgaattcaagaaagaagtgaattcaagcagcaaacccctcagatttcactttatcctgtgagctcctgacatccacaaaaatagaactgagcagacaggtttttagtgctctaaaggcccaatcaacctggtattaggatcgggtgtgaaaaatcagttatgccaagaagcttattttcctttgtaagcggaaataattcagtcatcaaaaagttctgaagatgcagggaataataagggacaaccttatttcatattcatgtctcagaatgttacatttcaaaaatatttaaaaactttttattataattgagggtgggcactctggctgaagaattattcctataaagggttttaaaagaattcaacaatggtgctgtattagggcatttgtttgcaagtgacagaaactcatccagcataaggacagtgtaaaagaaaatttattggcttatgttgctaaaacgtccaaaagtagtgctagcttcaggcacggctggacctaggggcaagtcatgccattaaagacctgtttcttgccatgtcttagcctgttttcacatgacttcattctcaagcaggctttctctgtgtgtctcttagctacaggcttgtttcctatatgcctagcaaatattagttctacagatgattcttggctctggttgttcccacctgggtcgtgtgcctaatcctgaaccagctactggggccagagttgtcagggctgttactggccaggcatgggccaagcgtctcctctgctctcctcctctctcctcctctctcctcctctctcctcctctctcctcctctctcctctcccctcccctcccctcccttctgccccccctcccccctcccctctcctctcctttctttttctttttctttctttgctgtctttcttatctttcttgtctttctgtctttctttctttatttctgatagagtttcactctcgtcgcccaggctggagtgtaatggcatgatcttggctcactgcaacctccgcctcccaggttcaagcgattctcctgcctcagcctcccgagtagctgggattacaggcatgccccaccatgcctggctaatttttgtattattagtagagatggtgtttcaccatgttggccaggctggtctcgaactcctgacctcaagtgatccacccacctcagcctcccaaaatgctggaattacaggtgtgagccactgaatgtctctttattaaacaacaggaaggttgatgtgctggtaccaaaatggggagttggttgggcagacaaaaataatgtatgtctgtcctttatgatgttgtgaacactgaggataaatgcttgatgaatgagtaaatggccagctcgatgctatccatgcatttgtttatttagtcctttaccaagttatactcatttattgtatggacttttgagcccttctagagagatctccttgtttaatgcactatgctgactgccagtccttggtgcgccctgtcttagtgtgttcagactgctataataaaatgccagaaatggggaagtttatgaacaatagaaatttgtatcattcagttctggaggctgggaagtccaatatcaaggcaccagcagatctggtgtctggtgagggcctgcattatcatagagggcaccttctagctgtgtcctctaaatggtggatggggcatggcagctctctgggagcttttttgtgggagcgctaatgccatacaggagggctccattcttaaatcacctctcaaaggccccatctctgaataccatcaccttgggggtgagaatctcaacatatggtttttgtggggtacataaacattcagaccatagcaggacctcagcagatgcttcttcttgttaatttcaaggttaatttcaactagatgtggctagatcatggtgagcctctctcccctgatcctagtcagatactggtctaatactaaccaggtcagtattagacagtttatgattggttttggctgaatggtcagccaaaagaccatctttattaaagacatagatgtccttaataaatctgctttgctgttgtggggaaagaaggtatcttcctttttcccttcatgccattcttagcttacattgttagtggttaattctaatccttccttttgtaagggggagaagaattttttttaaaaaaatcattacatgaacaaagaattgttccaggtttaaaaaaattatttcgaagtttaattattcatatcccttgctggttttccttgttgctacctgccttttgcaaatttcactgcttattagaaccacttcccgaaggtgggcaaggtaagatcgaggggtgtaattaaaaccttgatagcatcctatcttttttcttatttctttttggagggactatgtacttggtgatacttctgtgcaaaaccagttttgtacattgaccaagatgaactgtgatggattatctatgaaattcagttaattatctttttgtgtttccttttacaacaggaagtttaaagttggctgtgaagtcacccctggtgactggtggtcacctagacttcacatctttttatttttctttccttttgagttttgttgggatcaaattaaaaatgaatgaatgccaggttcagaagagggtaagtgtttgggcctgttcatctgtctcggagtgcctgttctatatttcacagcccaatggaaaagatttttaaaaatctgcctccattagcacagataattgagttttcgatatattgattttgtgttgtccagcttccacatttatttctgctctgcttgactagcttagcaccatcaatttattttcctatttttaatctccaaagtatttgtacgtgggttgtggtcaagattcataaaaaccattttgattaggtttctcattcatttatataccacactagcggggcatgcctttgtattatgagaatatttttagaagactaatgaggtggaaggatctgtgtttcatttctcttagtttccctctattcagacacctgcagttgccattgattactcctcctgtggtactctcacactctctttgtctgttgtgcagtgttataaaataatattgggagggaagctgggtgctgaggcatatatctgcattggaataaataattggtttttttcttagtagttcaacagaaggttcatttaagagtaatagctattttggtaccatttaaggaaattcttttcttttatctttctctgcaatctttgcctactctcagtagctgatctctgttggtcacctcactttattcttaatcaaaaaatttgaataccatttgtgactcatgcattgtttcggaaatagaaaattcttttttgttcaagttcggttttcagtggtaggctctttggtcaaaccagtccaggtcagctgggttttacaagtggccgataagcatgtcagcatttagaaaaacatttattcctgaatggcattttaaaaggaatatattttcttttggaagtttcacctattgatttattttaggaacatttttgttaaagtataatatgcctgcagaaaagtatacaaagcatcaacatataatctaatgagttttcagaagataaataacctgtgtaaccagcgtccagaacaagaaacaggtgattaccagctcttccgaagtcgctatccctacccgcaatgggtaatttccatcctgatttgtaacaccatcagattagctttgcttgtttttgtaacttatgtaaattgactcatgttaacgctttaggtctgtgagagtcactcatattttgatgtgtggtttttagtttgtttattcctattgctgttagaatcgcattgtgttaatatgccaaaatttatttatccattctactattgataaacatttgtttttttttctgtttggggtttttatgattagtgctgctgtgaatattctcgtacataacttttggtgaacaaatgtgtgcgtttttattgagtatataccaaggagtagaattgctgggtcacagagttaacatatgtttagcttcagttgattcccccaaacagttttccaaaatggttgtgcccatttacgtttcttccagcagtttatgatagttctagttgctctacatctgtacttgttcttttcttttttattttagccattctagtgaatgtttaaaacttacaattcatggattatagaaaagaagtctgtaatccccttaatactttgatcttagttaggtcctttagtcattcaagtcccagccagaatttcagtgttaaaacaaacattaaacaaaaaacttagagaaaagatgatcagcatttaagtggtgatatggatgtctaggccaaagaacaagtctgcagatcttcactttattttattatccccatcactagatttacaatattggtttggaagttgaaaaccacatatgcagttagaaatgcagtctttttaattcagtcttccatgccacattaattgagtgaatgtgctgaatatcacagggaatgctaagatgaagaatataatctggaccttcaagaagttcatatgtgtacatggcagagtgaagtgatactgttatgaagtgttaaaaatgctccctaggcactcttgaggaaggagtgattaagtcctatgagaggagtacaggaacacttcataaacattgaaatgcctttgaacttgactgtcaagaaattttgtaagtgaagttggaagtaatgggcatttcccaaaatgtagcccatttggagaatagcaaatggctcagagtagttggatcatagaatgtgcagagtaatacaaaggaagaaagttaaagggcatgaaatagattttcttaatattcaaagagagactatcaatcaaaaaaagccaaaaaacctcattagaaaaagcaattaaaacacatggagatagcattttttactatcctattgactgagatttaacaacagtgtttaataagagatttatattgatcagcatgtggagaaatggtcttcatttatggctggcaggagagtaaattgctctaaacctctatggaggacaatctggcaatctttttaaaaattgaaaacgtgcatactttttgacccaacaattctccttttagaagtgtaccttacaaaaatgcttatatgtgagcaaaagattatgacagtaaaagactggaaataacctaaatgtgggagaatgttaagtaaataatggcttatatagagaatgggggagcttcctccttattgatatggaacagtctctaaaatttattgttaaatggaaaaaagaatgtgtaaaacagtgtatgatggcatttatgcaaaaactgggaaatgaacatgtttctgataaaacaagtacagaattgattatattaattgcttcctgagagaacaagatcatggaggacttgaattctagtctgttttttaggttttattgaattcatctgagtgccctccctcctttttggttgctgttctcacagtaaccaagtgaggaagcagtttttatttgtgttttacagatgagaaagttgagactcaggaatttaagcaaaataattcagtggttgatattagagaacattaagtgtattatttaagaaataacttacatttactatattttgttagtaaaaggacaaaaagcaaaacaagttgaagcgtagtgattggagacatgtttattatcaattttatctggatccttacctgagtaccctattaccaccatgatcaaatttcagctgttcaacctagattaaagcttggtttcatactctctatccctaggtggaaacgttggaattcattacgaaagaagtaattgagggcttgataagtttttgcttaatgcaacctgaagatttgtttgtttggggcatttggaactgtaatcctgttttttgttttttgcttttttaattgaccggaaggcaggcattggatttgatggtgaggtttttttttttttgtctgttctgccatgtctctgcaaagtgtagattaatgtgactttaatagtattggcccccttcttttagagtattaaattcctctcttattggaagcaatgggcctattcaagtacagagactgaaactttcaagagtggcttaaacagcagttctacctacttagtcttatacctgcatagcaccaggcaaggcagatagcatgacttattctagttatactgatgagcagacagaactcatgcttgtaaagggatgtgcccaaaatcttaccactttaattgatggaacagacaatgaataaaaaaactagaaattcagtagaacaaagagaacacattttaaaaaggaatttcaacagactaaaagaactccatgagaagaaattaataatggttgaagggtgaaagagttaaaaaaggataaaacctgaattttcttataaagaaacaaaacagtatatctccattgaaaaataaaattttattaaggtaacacaagtatctaaaagacagatgggaaaaacctcaaaatgcagaaaaaggcctgttttacaaggaagaatacaaagaatcagaagtttgaggtctaacaatgagactaactttataaacagaaaatcttccttgatagatgtatatatgcctcatgtgcgtaagacaaaggaagatggccatttgatagtgaagctatgaacatggtaattctactgctttactcttccagtgttttactcttcagttcttcgtaacaacaaatacatggaatgggcaggtgggacataaagccagagtagagaaaactaatgcaggattggtttttaaaaattagctgtattcttttctgagtacccttatcccctaatgaataaaacagttctatccactggcatcctttgcgcatgtggaaatatctcagaacagggaagggttggttaactgggagccagttggcacctttgaggctgagtcaggggcaggctttgccctggggcaggctttgcagtatttcagtcacagagcagttttattgaagctttcatggctaagtgggtttatgcatgatgggaatcagcactgcgttcacatccagatgttgactgtgggtcactttcatcctgggaggagtcagtgagtattttccgtggagactgatccaggacctgatggaaatgggcattttcattagtgatctagaatataaagtggaaattatactcttagggtttgcataatctcatagctacaaatgagaaactcatagggtttcctcagcaggaccaagaactagtttgagtgaaaaagatctgaaagatcagtgactaaactgcacagcagtggctgtgctgaagaagctcaatgattgtatgtttttaaaaaacattcattctgtagatatttattgaatgcctactaatgcgtcaagcccccttgtgggtccaggggatacaacaacaaacaaagtccctgccctcatggagtttgcattataagcaaataaatatgtatgtcaggtgatagtaagtgctgtggagaacattaaagcagggataagtaggttagagtgtataggggacaggggtgctgctgtttgattttacatagaaatggccaaaggcctctctgataaggtgacatttgagcagaaacctgaaaaaagaggggaagcacagactgcacaaacatctacttagagaaaacaagaagtgcaaaggccctgaggccaccccagtagcctctcctccacagaacagccagggagaatcactagaatggaagctctgtgagagcaggaacaacatgtatcttgtctaccactgtattcccagcactggaaaaattcccagcgcattgtaagtgctcagtatatttttgttgttggaatagattaattgctaaatgacatggtagcccccaaactcattatgggaaaagtttgctttcttccttgttggtggggaattaactggtaaattaacctgctactggctttcagcaaattcatgaatgattgaactataactttattaattcaaaaataattttttggaagtctgttatgtgccagacactgttcaaatgttggtaatatgtatagtagtgaacaaaagaaaatccctgctttcatgaaacttgagataaggctaactccgtggcagagttgacaaatggtcagatactgagaatcaagaggtaaccaaggcacattatggatctttgaggctgtgattatggagggcatgatcacatttcccttgcctgccctgtttgctcaccctctactccatccttagatccattcctttagtactgtcagcatgaacccttggccagaaggaccacttatcagaccccatgggatactttttatgctctttccaaaaaaccttttcaaagtgtcttccacctttatgatttctaggtaatgtggttttgtcatcatattcctgctaaaaatttccaggtttgaaattaaagagagggtcaatgcaaaacgactttttgtttgtttagggtccacatctttaattcttttcaacgtactgttggaagaacctaagtttatttgtaggagatggggtcaggaggattgcagacttgcctttttacatcttggccccctctgtccccacaccttttttttttctgatttgtgtgagaattgaccaggcagcactgagtaacatggttgggatagagagagtgctgtttgtctaaacactttgtttgcagcagaaatgccaaggttaactgggtctctcgtggatatgattatatgaattgaagcagtgtagatgattcttggcataagagtagctataacaacattcttaattatatagaacttttaaagctattttggtctgatgccttaccttgggactgaaagattttgacatccttatggagaaaggattaaaaagtaagcctctcttggtgcagagaataaataacttcacgtctaaaaataccttaatatgcaaaaagaaaaaaaattaatccaaagtgtttggacagacttttcagcacagccagatgattcctggtgctcaggagagtactttggcttgagtgattctgtgtttggacattattgctactttgtttgcctgcatgaaaaagatagttttgggagaaagtagaagagtggaatatcatgaaagaggaaggaaggtcttggatgaagagcttcacagggcctgtttggagctgccacttccagtgtacccagacccctttctctcagtttgttctaaggttcatctggtgattgagaaagtgttccagactgttgatcatcattgtgatgattaccataaggattattttcttcatgagctgttttgtctcacattttgtagcaaaagctattcctgggatacatgctgcctgcttctagttcatgccgttgaacatttaatggagagtcaggcattgaccatttattaaatggagctccagttgtgccttgatctaagtgacttggagttctattttcattcatttgttcagcgtttactgggcacctactgtaccaggatctgaaataggtagtggatacaaatctgcagcttctgtttagagtaagcttccttccctgtctgaactgtttgatcactgatacaatctgactgcttcctaatgtgcctaattctttttctgatgatctatttagttttcatactgagagtaataatgaatgttcaattaataaacttttatttaagatgaatattcaagtctgattacaattcagcagatacgtaatacttttttttttaacacaatactttaataagacacatttaaactcaacttctgagcagcctttctggcagggataggaaattagaacctgctggtataattttttttgaaagaaaccccagggaagagttgcttggttaggaaagatggggcttactccttggcagagctgacaaatgatggcatattgagaattgaactatagatgggttgccagaataattaaagtgatgaagcaaaactacttaagtgaaggctttaatcttttaagatagtattattagcaaaagcccagagtatgtatttatttaccttttagagacggggtctcactctgtcgtccaggctggagcacagtggtgtgatcatggctcactgcaaccttgaaatcctaggctcaagtgaccctcctatcctagtctctcaagtaggtgggactacaagcatgcaccaccatgcctggctaatttttagatttttttgtagagacagtgtcttgctgtgttgcccaggctggtcttgaactcctgggctccagggatcctaccacctctgccccctaaagtgctgagattacaggcattggccatcccagagttattttaaatgagattggggaggggaagcggggttgatagggaattgggtagggaaatattttaaatctgggaaccttgatggtactcttgtttatagattcagctgatggtttgcatattggtagggcaggcctagaatcctggaaataaccttaccataatctctatagagttgatgtaatgcacagttaagaatgttgcaggattttgcatgtgaatatacatatgcctggcatgaaccgtattgagatacatgataaatttgagtacctagtctccaaaggtggctcatatgagcatctttccatatttatagagcaacatctaaaatttcatccaatttcaggatattctttaagggtattacaaataatattttagacatgttagattagaccataccttctgaggtttctgaggtttcggtttgctacagggcattgtattgaatgtcaggagacctagataaccggtatatgattagtgattacatgacattgggcaaaacttgagccttgtgggcctcagtttctctgtccttaaaataaaaagttggactatttatgttgtgcttagcttcttaattttttttcttaattctgtttagattacagatcctaacccacatgaaatatcagcctattgagcagaattttgtgcatcatttcagtgtctgggtagttcaagtgcctcctgcctattgcattccaagactaagactttactcaaagtctgagctccttttttgaagcttgaaagaatggccggtggggaggcccctctacattcattcgtgttcttccttttagttattagatgttataatccagttaataatatccccaagaagtgttgctgtcaacagtactagagctctctacagtctcattcatgttggaataaaatgattcctttttatgttttaaaaaaaagaaaacatttgaggtctcactggaagtgtttattcatttgagctgaaagatgtaccgtgggtgttgtgattttggagagcttctgcagcaggtttatgtctagaatgttttgtccctgtttgtgtttgtttagactgaaattaatagtttttcttgcaagctatgaggatcattaatacaggtttctcccccgtggtgtgtttgtcagcccttacatggaagaacaaaatgaaagaatatttcttgttttaagctcaaagcttacgtctttaccattaaattggggaacttgggggaagaaaatcctgtgtgtgtgggtagggggaagggatttgtgtatatgcacaataattaagtttaagtcataaatactaatagtcttctggcttttgtaaaccagatttctttcctggatctaaaagtgtttttattttttgtgcccacatctgtagtcatggatttgatgtatatatttaataacattcagtgatttatttttcggttcacctttttcatttttcccctttctttttaccagaaggaatatgaagttacatataaattctgcataattgaaaaagtgattttgatttactttttacttgagcaaggagttgcttttacttaaaggcatttttatttttaagaaatttgaaaaaaccccacttaaggatccacttacattaggccactagcaaatatttttagataagattttgattgatttctttcagtctgattccataatctcaaatttcttcgtttcttttctcctactttccatcctcttgatgctacaatcaataatttgatttgggagattctttctttttgttggggctggtggtggggagggagatcgttgttttgaatattaaatgatcatttaatggggctttgacacaatatcatataaatgcaactttaatccattcattcagatttaaggcttagctttatataaaatatgaagcttaattttttttttcaactcaagttcagtctcctctgattttgtaacagacttctaactgttgagcattgactttaaacagtcctctgtggtgacttgagttccaaattacataaccactttaattctgcactaatttgttctgaatgaccctctttctttcatttcacccttaacatctttggctaagaaattttacatgtttttgttttgttttgttttgttttttgagacggagtctcactctgttgcccaggctggagtgcagtggcacgatctccgctcactgcaagcttcgcctcttgggttcgtgccattctcctgcctcagccgcccaagtagctgggactacaggcacccgccaccgcgcctggctaattttttgtatttttagtagagacggggtttcaccatgttagccaggatggtttcgatctcctgacctcgtgatccgcccgcctcggcctcccaaagtgctgggattacaggcgtgagccaccgcgcccggcctacatgttttgtgtattgaactaaatagtttctgtttttcccttttgagacctttgatgagtttaactctttctatatttcttggatttcaagttgtaagccctagttataaggacttaaatgaatattgatacaggcatttcgattctctagagatctgctttcaccaatatgtgtgtgtgtgtgtttgtgtgtatttttgtatgcacatgtcaacgtggatggatatttgttcctggagccttaattgcattactaatgtttattctggtaaagaaaggcagtgtggcaaaatgacatgttttcttaggagcttttgtgctggcactccatgctgttatgaatactttttatgacctggcttatgaatctaatcatttataatagcatttctgtggggaaaacaatggattgcaaattccaagctgttgacttataaacatatttttgaagcatgaagtattgataaattggagactgttgaaatagtccataaggcctgggcttagtttggggcccatgaaagcagagcctgaagcaaggagttgggtgcaaataatttatttgggaggtgatcttaggaagcagcgctgagggagcggggagagaggcagggaaggagaaagtcaataataacagagtgtgttatagttagagcatttacacagccatccctgtacccctctgcttgaggttgtgcactgggccatttgtacttccgcctttctgggtcactcttgccttcaggctgagttgatgccacccagcttcaaagaaggctctggggacaaaagagacacttatgctgtctttagtgggagctgtcagcttgaggccaccctactctgaactccccgccatggcaatggctgaaatcagaggtgggtggagggaatatgacaaggggacatcaagaggatctgctgccaacatccaaaatggattgattatatacagttcagctaacctatttcattgaatcaaagactgtcaattgtaagatcccccattaatttatgtaccactaagaaagaaaatgtcccactgaggaaggaaaatatgctgccaggtaaactatgatggctgttaaatgtgagacacacccaatgtcagagatattaaaatatgagaaagagtgtgttccagacttggtggaacacagtatgtgatgaatactgtgaagctatgctgtaggtctgtatgtcatattatggaaagatgtcaggaatacattgttaaatgaaaatggcaggttatacagtgtgtaaaatgtggttctgttaacgtgaataagcaaattgataaattctaggtgaatttacgctcaactactaatatgaattctccccagtgtggtgagattactcacaatgttttcatggtgagatacgcctggtgtgacacagtttacaaaggaaaaataaagaagtagaagtctagagacatcatgatatgcagactcttttgataagtcattaacatcataaaagccagatctaaaacctcctcctggaaattgtttaattaatttctgtttctgttgactaggagcagtgttgttattacgaacaactgatttcctgtgatgactcataattcagccatatactttgtatccacacctcggaagagcttgtcctgagggacctccatctaccctctcagttaagatacttctgatgtctttcttcactcttcatgacagagggcttagtgagattagctggcttcagtattagcctaggtagacaaataccaagtaaagatgtagaattaaggatcctgagatttttaatagatgatttgggaattatttactcaaagaaaagatggagacatcctcttccatagaatggataatagaatagggctggaagaaggtattgcattatcacccaatcctatacaccatctgattctgtaatctacacaactttgctgatggacatcatttagcctctgaaagctttttcagtgactcagtaccattgcatgaaacccattccagctgtgagctatcaaattgttagaagggtctttttaaaaaaaaaaatgaggtaaatctgcttgctttgacttccacctgtaagccataggtctaccttctgaagtattaatagaaaagtttaattcttttgtatagaagtacttcagctatttcctctgaagtagaataagtctgatgtcttctgtacaacaatgcttcaaatatttgaaaatacttttctgtcttctcctaagactttctttttaggctatcattcccagacttgaaaccacttgagaatcttctctctctcgctttgtcttccgtagccaagggagaccgtttctctgtgatgtgtccttgttgttagctccagctcaagggatttctatataggtctgtgagcttgctgtatggtatatgataggtcgtcttagtttgatttttttatttcttgaaaaagatttagaaatgaacattggattaaaaaaatcattcttaaagcttaatctgtgatataatctcttgcatctttggcacacagtgaatggatagagctctttggggacattatattgttcccctgtacagtgtcaaattaccaacaccgatcacagaatctggcacatgggtagtatgcaatgagtgtgtgtgtgtgtgtgtgtgtgtgtgtgtgatttaattggatatgtatgtatacatatatacacatgcatatattacttgtgttcagattatagtttagtttgtagcatatttctaatgttcaaatttcaataaatactgtgctatctactcagaaatagtgattcctagatatttttggcaatatttggcttccttcttacccatatagataagttgttggtatggttagggattaaatattatgctaaaaatgttactttgaaattcatttcttgatagggactgaggaaaggtagtttctgtgaaataaaaatatgcagctttcaggggtagtcacgtggggagcaaaagcagcagtcaggagtgatgctctggaggcttctggtgcctgggtaaagccaggctgcacacatgctgtgagctgattccttctgtagccattgaactctacctggaagagctttattcagagaatttcctagctgtctttttttctatgttaatacatttttggcaggaggatagtgaatagtgacatcccacacatttataggaactcagttttgcttttattttctaaatcctttgttatggaattatagaaggctttcttagaagggaccttagaatcttagaacctccatctgttgttttactcctttctacaacaccttgacttgaccatcatcaaggatggggcactcctgactttgtttttagacagctctatgccttgctagaactcagcagtccagccttctgtggtacagattgttttctttgttgtacaatttaaagacatgaaagcggcaagaataatgaacaataatgcttatccttttcgttttgagcacaagccaaacagcaaacctttattggattcctgatgagtgttgtgggaaagaaaaagagttaagacagttcttatcctcacaaagcagatgatatagatggagtcaatttctctctctcctcactctcctctttctctttctcccacacatccctgctacttcagctcatgaatccaaagcatatgataaaaaatgatgtgagcagaggagggagaaatgtttgccacatggagtggataagatggacctgagcctgcccttcttaatggcaggactctggtggtgtggccttttgttgcttaggagtccaaagtccaaaagcagctttgtaaccctcttgttaggctaataattcagttaagcttagcgtattcaacaaaacaagatacttgtactgagcaaaataacagataatgtctgttacttccctcttaatgtctcatatctaaaatatagtcttctacctaaacacatttttttaactaatggaaacttacccctttaagcactgtggaagttttaaaaactgaccagaagttctttcattgataggtgaggtctgtgtacccttctcttaaatacgagttggtttgtgtctgctccaaccaataaaagtacggcaaaaataactctatgtgacaacttagtagtctaggttgtaaaaggctgtgcaatttctgcttacttctcttgggacattagctctgaccatgctaactgccaagtagaagtatggctactctgagattctatgctggagaaaccatgtgtaggtgacccagccagcagccccagctgagctcccagctgagctcccagctgacagccagcattgactaccagccttgggagggagccacctaggacacctacccagctgagccttcagatgactctagccccacctagctccagccccacctggcatctgattgccatcaaatgagagaccctgagccagagctgcccagcccagcctttcctgaattcttcaccatttaaattatgagccagataaaatagctgctatgttttggggtactttgttacttaacaatactaactggaacaagtactaagaaataaaaatgtttgaaatcaactgtttatgcatcactctaaaatgtattctccactgtattctttctttgaacagagccttaacataattcgaacctcttatgaacgaacaatcagcatcttacctcttacattgtgattaatgtagttatgtcctcaagctataaaatgagttgcaaagggactctagactgcttagcttttcagggtcttacgtgtacttctatttttttccccttgctgccagtaatcatttcaccgtatcagagtgtgccactttcaacatgttcaaccacatttggaatcattgtgttcaaattcagatactgcccttcgtgcaggatgttttcaacaagtatttagtgagtgcttactttgtgtctggccttgttctaggtgctagatgagatgttaagctttaagatagcagtgatttttgtcactgatatatctccaattcctagaataatatcaatacctggtgtcactaagtctatgttgaatgaataaatatacaggacactgtgttaggtggtcagagcacatactcatgatggattctgccattagaagagtgaataggatggagaaagaactggaaaccatgttgtgggagaatgaatgaattaaatggagatgtttagcctggaaaaaagaagggttgattgaaggagggaaggattatcatgtggaagagaaatggtactagatttgaaatgaagtgtttttcttttttatttgttcctttattatcaagtgataatattacttaagataatataggtggtaaactccacccaagacttgatactcaagtaatcaaatcttgagtagggtttgccaccaaaggacctggcagtggcggttttggtttaagaatgctgctttctcaaatacgaggaaaaatctagtcatggaatctatcaggaaaagaaaatcagatgttaactccattgggccagaattattgtttcctgttttctggtttctaaaatattttttgagaatgatgtggttgttcattcatttaaaatgtcactattaaagcaaatgagaagggccttatagaggagttatgtactttgctagataagaaaaatacaaataccatattgtggtacaaacctttggataaaatagcacatacagaagaacctttgacattccttctcttttgaaagggagaggataatttggtttattgagattttatattcttaaacatcaccatggcatttttttttttttggagtctcgctctttcacccaagatggagtgcagtggcgcaatctcagctcactgcaacctccgcctcctgggttcaagtgattctcctgcctcagcctcctgagtagctgggattacaggtacgtgccaccatgcccggctaattttttttgtatttttagtagagacggggtttcgccatgttggttaggatggtcttgaactcctgaccttccgatctgcctgccttggcctcccaaagtgctgggattacaggcgtgagccaccgcgcccggccaccatggcatttttaacacttggagtttcttcttaacatcaccaacttagtcccagtaatgatcaggtaagtttaatgcaaatgagaaaatagaagcctttgctcaaagtctcacaataactttaggagatgttacagccactattgtaaccagacatcttattttagaatatgaagaatccagtaatctcttcaagtcaagataacttttaatctttggtttctccctaataaaaatgttttcttaattttttttttttttttttttttactttagactggaaaattttaaatttcttccttggtttttctttgccgatgaaaggaaattattgactacttatagtctcctgtccatgccaggaagactgattaagtaaaggattcttaattcaactattattgtctcttccagtttgtgtttaatctgaaacataagtaaatttcacaaattgacttatctggtggagtacaatgataaatatcaagattcaaaatggaccaaccgaaagcatatctatttatgatatttattctggataatgacatcttcagcagtccatccaatttagtcatgtcatagtgaagatatagtcagcaccagggaacgtgaaagcttttcttagagtcacatttccattttagtaaattccacttgcctgatctgtttcaaaattgaatctgtttcttagcatgactctaatagtatatgggtttccttggagatatgtagagatacagagttatagtgttaactctgatcttatctagtttaacggaactcttcttagaaaggtatgctgttatttcagtcattaaaatatcccaccaaagcaaatatagaaactatgcaggtaagatttgaggtgataaacttcaatttatgaatgtggtgcttgactgctttttgtattggaatgaaataactaaatgaacagactgaaatgttttttgtccttcctttaagcctttaaggtacaagcacatatgtacaggctgcctcatagcttcagtattcttgtctcattcactgtgtcatgatttgctgtggtgtgacctagagtattggggagtgagagggtcagattcgtcagcatggatctagccagtgtactgggcatggcactgcaccagggcaaccatggaagggacataaattagtgaattcacgaacccctgggctgccatagacaggacagactatagtaaggacttaatgatctacagcataatgtgggaaaactttctgatgttccattttacctgggcatttcttctagccctgggttggtgttctgtttggagccagagagaggatggcctttgcaggtaggcattgccatagcatcttacctttgcagaagaagcaatagcactgctcagctccttaatttccagtgtcacacagttgtttgtaatgtagtttcttaatcaccgttgtgaaatctgtacagtgacaggttttgggctttttgtggacttcatttgatggcaaagtttgccctgtcctgccatgaggctattcatgatcgttatcccacttaatagggatgttcatacgtgcaaaaatatcagtgtttttgactgtgaggtgctgctctaggccctgctggaggtgttataaaatatacgacatatgtattgtattaccttaaaaaagccattttgaatattcctagccttgaaggtttcagaaaaggaactgaaggcttgcacctaacaggaagaaaaatggccatcaccatagaaacacagaagctttcatactttgcatttgtcctaatatttcagggactctaaattctctatggttgagtagatgagacctgatagcaggattccctattctgctggtgatcagcgtggaatgcatggattaccatgggacagagaagaggcccgtgaaggatctaaatccaggaaacaacagaagcagtgtctggaaaggcaccagacagacatggcttcaggcactcctggctacaagtgcacttagtgccgtggtcaggtgtgggggcccttagctgtatttagaactaccgtttcattatattagttgtataaaagaatacctatgtttagattgactatttagtaaatgtggtttagttcattccgtatggtatgaaattcattcttttcaaatagcccgtttgttttcttataaagttctgaggttaaaaaaaaaaaaagcatcttgagatattgttaagggaaggcttcttgagtcagctggacacaacatacatttctggtggtgcccaaagtacttggagcagatgggcagcaagcctcacagaacaaagctttttcttttctgttgcgttatgtgttacaaagagagatgtgagcaaaacacagccctgagtccttagaatgacactgaagtgtggatactggtaactatacagcctgcctggcttgtcttgcatttaggataagtggagtaaaatgtgagtgataaagggggaaaggaaggttgagttggcgcttaggaggccttcaataccaccactgtatagttgtacttcattttatacatcatttgttcacaagttttgcatttagaattccatgcaatgatgtattacacttcagataactaaatgtgttattttatgctaaatcagagagctcttctattaggtgtgattatggtcaagtgggagaacagattgtcattacttgattttagtggtgggaatactgtcacctatcttacgggatgcaggtgctataagagcttgaaagccagtgctctgggtgaagaggagtcactgcaggtctttgcatagagaggagtattcaaagagatgctttaggaggattcatttggcaactgtgtgtggcatcatttagtggggagagctcactacaccttggaaagctaggtaggagatattgtagtcaggtaggcgagagatgataattgctacctgaacctggcagggagcagcaggagtagaaagaggggaaatgttgggagtagagactttaagaaatatcctagatgcattggattcatctccacttttctcattttattcctccagggtttttctaaattgataagaagtaagacccaattaggaggagttatctgatagtagactggaatttttaggattttcccagggttcagggcaacatttcttatacatatgtgaaaggtcatctacctgaaactattgctaaggcaaatagaattctccttaaaagaaagcaatgttggccgggtgcggtggctcacgcctgtaatcccagcactttgggaggccaaggcaggtggatcacaaggtcaggagatcgagacaatcctggctaacatggtgaaaccccgtctctactaaaaatacaaaaaattagctggacgcagtggcaggagcctgtagtcccagctacttgggaggctggggcaggagaatggcttgaacccgggaggcagagcttgcagtgagccgagatcgcgccagtgcactccagcctgggcgacagagcgagactccgtcacacacacacaaaaaaaaaaaaagaaaaaaaaggaagaaatgttaagaagagcgatgtgggaagtgtgagctttggtttgtagctgtctcctgtttgccttagagttcctggcctgttgttatcctctgctgtgcttatattgaggacttacctgacatcttcattcaccgttcctcatctccttggttttaggtacctcccataccacctcagccgcccgctccagtggccaaacactggtgctctcactttgagatggttatctctgaaataccctttcctccatcacggcccctgtctttcccatctgctttctctcactaaaccttttcttcagactcattgtgaatttattccctgatctgcaccctgttcagcctgtctggtctttactcttccacactctttacttctcccctggtgtacctgggctatatagtcaacccttttgatgatctgtcattggtaccagtaatttctacacctcctgatcttctataggattcatttctttctccaactgtgtttcaacacaacagtccacttcttctgtctttgtactcagtttaccactctgcttattggctttcttacaaatttatgattttaatattaacagaagcttttgatctgaaaatatattttcagatccaaagttcaaaccctttcccattttttttgtagcagctatttcaaacctttattatgctcttcaagaatataactttctttcacaatctcattggcagcatttgaacttgttttcatttcatctagaaacagaagtcaataggaagaaattctcccaactttatttatttatgtatttatttttctttctttcttttagttctgggatacatgtgcagaacatgcaggtttgttacataggtatacatgtgccatggtgatttgctgcacctgccaacccatcatctaggttttaagacctgcatgcattagatatttgtcctaatgctctccctcctctttcctcccaccctcctaactttagttatagccccctgttactgattttttcccccttctcagtgactgaactgggtcattccattctaaatcttcactgtctcccaaggcctcgtgatgacattttggcctgttaatgtttgatactgttgactattagggtgattttggctgcaagtaatggaaaacccaaatagaagaaactacatttaaaaagtctaaaattagggaagttccagagttgcttaattcagtgggttgactgtgtcctcaaggacccagtttctttagtcttttcttcctgcgtgtttaattttttaaaacatgcaacatgttaactttttgtttcccaaactttccctagagttccattggccaggattgtttcagatgcacttgcttaagccaatcaatagcaaggggaaatgggattttacctgataggtttagaattgtcaggatttacagctggggttggggaggagcccaagctctcctcaagcacatagcttcctaatagctgaacaaaattggaattcttgtcagccacaaagaagcacaggagaatggctactgggcagacaattaccagtagcttacacctcctccatcctcagagaccttggtcctttggattatggacagtgttgttcttccttctctgaatattcttgatgtcttagttttcttcatttatcttttctctttctttctcttaaatactgcatttcctgggatacttacctcaccatctcttcttgctcagtgctgattccttgggctatcttaactgttcctatgatttcatccaatatctctgtgctaaaaattctttaatctttatttctacactgattcctaccccttgcactctgtttcatttgttcttgtgttctgcatcttaattaatcacatcatttactatgtcaaataatgttgcctcccattatatactttttccttaataacaatcttttttttttttctttcttggccacattagttttgctctcaaaacacacacacacacacacacacacacacacacacacacacacacacacagacacacacatcaaaacaaaacctcattattcagttttccttgcagctaggtatggccgtgtgactaaggtcttgcctgtgtatgttatttaggagtattgtatgggacttccaggaagcctaaaaacaaacaaacaaacaaacaaacaacttcagctgggaggtatacccttttgctcttcaacttttccttcttctggccttcaaatttgagtgatgactagagtttcagaagccatcttggtccctaaggagaccttgaaaattgaagctgggatagaaggatctttggtcattataaccatgaagctgccatatcagctttggaatgcctacctgtggattttcatgtggcaatgtagtagttcaggctgctataacaaatatcataaaccgggtaatttataaacaatagaaatgggttgcttacagtctggagactgtgaagtccacgatcaaggtgctggcagattcagtgtctggtgagggctgcctgcatcatagatgatgccttctttgtgtcctcacgtggtggaaggcaagacagctctctgggctctctttcataagggtattaatcccatgcaaagggggagccctcatgacttgatcaccgcccaaaggctccaactcctaataccatcaggttggtgattaggtttcaacataccagttttggcgggacagaaactttcagcccatagcaaataagcccttgtatatttaggccaccatttggagataaggaggaagtatcttatcggttgcagttaaatgtagttcctaacagatatttctacttttgttacccaagcagaacactccatagttttcttctctgtccttcactgtccacatcctaattcatggattatactttggaaatacctttcgattctggaagcataatataaaaccagaacaagaatatcgtttctacactcacaaatttgttcaaattaaatagtttgactacaccaagtatgggcaaagacatgtaagatgggagctcatgttttattaatggcaatatcatttggaacaaccagcttggagaatgatttggtaataagtaattagttaggtttaaggtgtttcatgttttatgcctgatagcaccataaacctccagttctatttccagatatgtaaaagtgtggcacatgtattgggacgtctcatgtatgctctgttcactgctgtattgtttgttagagaaaaacattggaagcaacctaaatgtccatgagtaagatggataaataactataatggactcagtaaattaaattctataaagcagaaagaactaaaactatatgtatccttatgggtaaacctcaagaataatgttgaacataaaagtcaaattggggattatatacagaatgagcccattcataatagttaaacaattgaaataaaaatttactgatatggtttggctgtgttcccacccaaagctgctacaaaacttgaattgtagttcccataatccccacgggttgtgggagggacctggtgggagaaaattgaattatgggagaggttccctccatcctgttctcatgataataagttagttctcactacatctgatggttttataatataagggccttttcccccttttgctcggcatttctcctgccgccatgtgaagaaggacatgtttgcttccccttctgccatgattgtaagtttcctgaggcttccccagccatgctgaactgtgagtcaattaaacctctttcctttataaattacccagtcttgggtatgtctttattagcagcacaagaatggactaatacagtatccttttctatgacaactgctgttgctgcctctagtcaggacctcattgtttttcacccggtatatagttttaagagctcaataatttatcttcctattccattctctcattccaactcacttttgatactgataccagtctagtcctctgtttaaaagcctttgagtttcctactgcatataggataatgcaggcaaacttttatcatgttattcacgattgtttccagaatcatatcccttcacatcttccctaacttctacatacctgttctccagcaggccctcaaagtatttgtgcctgcaggcagtctctgtgactagagtgactctttcccctattttcattttctctttgccacctggcagaagcccaaataggaggtttcaaggcccacagctagggtccttcctttctcagagtcattctgctttcccactcctagacagaattggctgtttacttctccatatactcccaggactttattctcattggtggtgttaagaacttggcccattgtattgcattgcagttttgaccttgttaagagcaagatctttgtcttgtgcatgttgaggtcttggagaacctttgcataattttagtacatagtctgtggtcattaaaggttatattgaaagaacgtattcatgtttgtggattgtgagaggaaaagttagccctaagtaacagcctgtattcactgtctcagcttcctttgaaatattcgcatatgttcttacttactcactcagcttcatggggaagaacttttcaagtttatcttttactggaaccagtaacttaaggccccttcattatgaagttgatagaggttgtgttttaggggagtgatacaaaagatggtagttttcaaccagaagaaatcttaagaatgaattaaatggtgataaaaaaaaaagattcctggggaggggggagggatagctttaggagatatacctaatgctaaatgacaagttaatgggtgcagcacaccagcatggcacatgtatacatatgtaactaacctgcacattgtgcacatgtaccctaaaacttaaagtataataataaaaaaaaaagattccttcttcgagaatatacagaacataccttttttttggtctttttctctgctttattaaagcaactcatactcattgcaaaatagatgccagaatacataaaatagaatttgtagaagaaaattaaatattggtgttcccccaccccacccccaggcacatagagacacatgtgagaattgaatcattctataaatattgttttgtaacttttaaaaaaacctaatgtgccatcaatcaatagaacttttcatcattctttttagatataagcatactttataatctaaattgtataactgaagtatatggcctaaccaccacccaggtcaagatatagaccatttctagtagtgtaaaaagttcccttgtagttttctctgtggtgatggacaattctgtatcttgtttgtggtggcgattacataaatatatatgagataacattttatggaaatatatacaatacatatatacacatacacacaaagtgagtacatgtaaaaattggtgagtttctgagtaagttctgtagcttaccataatctgagtaaactgtgtagcctaattgtagtgtgccaatattaatttcctgtttttgattgtagttatacataagatgttaccattggtgggtgctgagtgaagggtacactggaccactctgcagtatttttgcaacttcttgtgaatatatatttcttcaattaaaaagcctccctcatgcctgttttatcattttaatggatgtcttataggttattatgtagttgtactacaaattatttatcaaattttctatgcattgagatgttttcctttctttactagtacaaacaaccttatgatgagcaaccttgtacatattttttgaaagggggcttaaaggaaaagccactaaaagttcttgtgagtcattttaaatggctacatacaatttttaagaaaatgcattatgtaaaatgaaacaaacccatgcagtagaaataattaagtcccccagaaagaaggcatttcagcaaaattataatttctggcgtttccatctgcctgttgccaaaagtccaaggatgttgaatcccaagccaaggaacagaagacataactgaaaattggcctaattcaaacctgtgtcattatatcacttctgaagggtgaaatatttccagaaaagatccattcaaaagtaagctgtatgacaaactctattttacagcatttatttaaaggataaagccgtctaagtagttatgctgagtttccttgatatggttcatcctgatttctaatccgattttgagaagatcagcttgcatgatagacttcttgaaaccctaatgtactttgtgctactccctagtggttgggggccaaaagatagatatgtttttgataacacatgcagtatatgagggttgttttccatttaggcacagcaggtactctattctctaccagtaaatgaaggtgttttgttttgtgttgttgacactgttcatttcacttatgttctattcccggctattattgtgtctttgatctgaggaactcggttatctgtcattaaagcttaaaactcagacacaagaaaggattataatgaaagggttattgcttctgagacatccagcaaagcaggcttacacttgtcaataagatcagtgttgaacatgccatatctgtgtaatatttgaataaaaatttgttgagatgattgatactggtgtttttaaaatgaggcctgtattgaagtggtgagatttaatttttcatgtaaaagactgctccaatatgaccttattttccatcagttacaagcttgaactcttggctccagctgagaaaattaacttcctatcagattcctattttagagctattacacacatggtctatctgcattcttaaactttgcttttctaatgtcatctataaaggtatttatagactaaactgatttaatgccaacaaatcttagtatttgttgttttactctatttatgctaagtggcatagctcttgtgtatatatgtttcgctgtatatttgactgaaattccaaactttgatagcaaaagcagatagtaactttgggaattacccattggtttgcttttctcataactaattatttaaatatcaacttatgatcagaactgagagcataggcaaatacttgcctcaactggagtttaagataaataaatgatagaaatgcaacatttcttttttacacaagcttagagttttgctcaattactagtttttcttgggaatggaagcataatcggaaatattaatgatttaagtgttttgcatggtagggtgaatcttgtttggggtttagactagcttgagactgttaataaagttttctcgatgtttttctggattttttttgttctcctgatgttgggcatctttttaaatattcataaacttaacatattgttatgtccatgaaattattcagtaacaaatcagagtccattgagagagaaaatgttctaaagggtgtatgttggcaaggttgctttttaccttcatgggttggttctttttttgactctagagcagtgttactaaattgtcaagctgaaatgcctcttatttgactgcctttttgggagtttgcaggtggtactcatgatcttttctcctttgaacacgtgtaattgaatgtccctgtcctctttattccccattttaaccttgagcagcgaacccccctctcagctgggtcccagttctgcaggcgtctgcgtgcgtggcctgttattactctctgaatcactgctggccttattaaactattttgggcagcagcccttccattctcctcctgtgaaccgtgaagactggagttggtgcagcagcatcaggtccggtgtggaatttgaatatggaggaaagacggttcactggtttgtaacatggcattctgccttacagaacagtgggggtctgtccccggggaccagttggagtcttgaaagtttttgtttcttttaaaaagtgatcttagaaagatcgttcctgaatgcccaacatttcaaatgcttgaatataaggcagtttggtctttgcccctgtcttagtccatttgggctgctctaacaaaatagcataaactgggtggcttataaacatcagaaatttacttctcgtagttctggaggctggaaaatgcaagatcgaagtactattggatttggtgtcttgggaggctcgttttttggttggtagacagtgcctttttgctgtgtgctcacagggtggaagggacaaggcagctctgtggggaatctttaaaagggcactagtcccattcatgagggctctgccttcatgacctaatcacctcccaaagaccccacatcccaatgccatcaaattggtgactaggttttaatgtatgaatttcagggggacatcaacattctcaccagagcacccccttttccctttcattttctctaggatgtttatgatcctggtttgtgttggtggtgttctcttgctcttgcattctaacctatctcagacccctgggcgcacagcttgaaacttgaccggggaatgctgcaagtacactggataaaaaggtgatcttcagtccgaaatgcctgcattcaaattccagtgatggtggacaaatatgaccttgttaagcctcagttgccgaagctttaaagtgggacaaatgtgcccattcatttcttattaattaaataagacatggtttatgggaactggtttatgggaaaactgaccactggtttgaaccagtctgtagggaaagccctctggcctttgttaaggagagattatcattcatctagtctacatgttttgttttacagatcagtcactgagacccaaaggggttgtgtttacgcgatgacacagctgtatgtgggagagtgaggatgagagcccaggttttctaactcctaatgtttttccattaagcctcagcttccccatatattgctggctcaggaccacatttgagacagtatcagtcttgttgatgcaagtgtttgttgttcatcagaaaatgctttttcacatgctgtttcatacttctctttatttccttacatccccttccttttttttttcttttaggaaagactatattagttgcctattactgctatagcaaattaagttgctttaagcttaagttgtttaaatttatgacttaaactaacacaattttattttctttcagttctggaggtcagaaaactaaaatcaggtgtcaacgggcattgttcttttggaggcttttgtggagaattcacttccatgctttttctgtcttctagaggctgcttgcattccttggctcatggcttcacatcacatctccttttcttcctctgtttccatcatcacattgccttctacatctcctgacgccctcttataaggacccttgtggttagatcagacctcccaggacaatccaggataatctccccatcatatctgagaagtcccttttgccatataaggtacattcagtgcttctgggggttagaacatggacatatttgtggaccattattctgcctaccacagacaggcacgtaacttataacccagagttcccaaattatctcttttcacctatagttctgaatttttttccaaattaaataacacttttcagtctgctcacaaacatttttgttagccattcatactcctccctctgtgccccacaatgaatacctccttttagaaaagacctattctagaaatggaaggaactgacaccaccccctcaaatgactgttcagacttgttggcttaccttgatgttcaggaagcaatggttgggaaatggatgtctgggagcatctgtcttcccacagctcactttttgcctctgaacacgtacttcctgtgagaatgttaaataatttttggaattaaaaaaatcatcttcacattctaccatgtatgtatttggcatttggattggagagaggtttgcctacttgtttttggatataggtcaagtttcagtgacaaaatctcattgatgaattcatttaatcagaaatccttcacctcaacctaggttcttaaacccttaaagactccacagaaggctttcagagagccagaccctttgggactgtgcaaaaccatataatcatttctggaaagactggaccataactttcattaaattttttaagaggttaacctggaaaggttaatgaccaactgaattgatggctttattcttcatttcccccttaggtaagaggccctttgaagtacactgcatatgtatttttaatatgtgatctttttttagctgcaactcagtgtcccccattcctattgaaatagacctcccactgaaacctgtgtcttttttgctgtcagcaataaaaagtttactttttttttcttggcatattttgagatatctttagaacaagagatgggaaacctttgttaagtgtaatcttaatcttggataggcagtataaaatttgtttgtttagacaggaattgacaacaaaaagtgttgagtttttcccatgtattcctacaaacaccagatgttttatttgcacattttttttattttagtgcatatttccttggaactgaaaaaactagtttccttcagttttgccatgcatttctgcctcacctttgatcattagttaattagaagaataaagccatcaattcagttggtcattaacctttccaggttaacctcttaaaaaatcattagttaccctttcttctaactcctaaagttttctcataaagaatgtatgatattttccttcctttatcattaacgatgccttcacctttactttacccttaccttgctctatgagaacccagagaggtgaagactaactttggggatttggttggttttttttacattgctagatatacgaggctgaacaatagtaaagagatattgtataagcatacagcagatatcaaatgaaatccaaagatttgccaattgattcactccacaatttaaagcttagtgagcaaaacatacatgaccaaggatgattacttatgcttttggaatcagaaacgttttttaaaaacaggtacaatttggaattaaactcagatgactataaacggaatgcattaatgttcacatcaaagttcatgatttggcaaattagcttggaagcagcaggcaaggagggagccttccattgaatggaactcctttcttgatgaattcttattccttaaaaaaaaagtgtggtatttgggagagaattatagcatgaaatagaatatattaatatacaaattctctttgaaacctgtgggacagtctgtaaaaaaaaaagtgctaaactattatgaaagtactgcgatatttttggtaaaacttattgatgttcatttttacttagtacaagaatttaagcctcatttggctcaattaactattttatcaatagggaagaaatgaggtgggatagatggtctttacggcgttagcaactatttaatgacaaagttggtgataaaatttacgacaacgaccctgatccagcgacctttcagtataccacattgcctgtgttccttagaaagaggaaaaagttacacactgaacgaaacagatttcagaccttctaaattaaactacagtgaggcacacctgcacacccatcagcatgactaaaatgtaaaagactgacaatagcaaatgttggctaggatgtggagcaactagagctgtcagacatggctggtgggagtataaagaggtgcagctactttggagagcagtttggcaatttctaaagctaaacacgcttaccctctggcccgtcgtactgcttctttgtatttacccaagagaaaggcctgtaatacaaatgttaatagcagcttgattgtaacaactaaaaactggaaacaactcaaatgttcatcagctggtgaacagataaattgtggtgcatttatacaacaaaatgctactcagcagcaaaaaagaagggaccactgatattagcaacaacatggctgaaactcagaaacatcatattgaggtgaaggagccataaaagaaaagagcatattctgtatgattccattaatacaaagtcctagaacaggtaaaaccagatggtagtgatagaaatcagaggcatcagggttagagttgactgcaaaagggcatgagggagctctttgggtgagggaatgttctttgaggtgttgattgaagcgatggttacataggcatatacatttgctccaaactcatcagtctgtacacttaaaaggggtgctgtattctcttactgctatacagaaataccctgagactgggtaatttataaagacaagaggtggccgggcacggtggctgatgcctgtaatcctagcactttgggaggccaaggtgggcagatcacgaggtcaggagatcaagaccatcctggctaacacggtgaaaccccgtctctactaaaaatacaaaaaagtagccgggtgtggtggcgggcgcctatagtcccagctactcgggaggctgaggcaggagaatggcgtgaacctgggaggcggagtttgcagtgagctgagatcgtgctgctgcactccagcctgggtgacagagcgagactccatctcaaaaaaaaaaaaaaaacaaaaaggaaggtttaattggctcaccattctcaggctgtacaggacacatggttcgggaggcctcaggaaacttacaatcatggcagaaggcgaagggggagcagacacatctttcatggcctgagcaggaggaaggtagagaggaggaggtgctacacacttttgaacaacaagatctcacaatactcactatcatgagaacagcaccaaaggggaaatttatctccatgatccaatcacctcccaccaggccctacctccaacactggagattaaaatttgagcagggacacagacccaaaccgtatcaggtgcattttattggatataaattatacctcaagaagcattttttttctttacaaaaagagatagggtagtgagaagctaaggtgtggaacagcaaagcacagttggtataaagtgtaaaatatttttatcatgccattgaattttctgtagtcctattttctctctcaaaatggtaaaccttctgttattatgcccttaccacttgtctcagaacacagacataactacaagcaagtgtatcacggtgaaaaaaactgaacaatccacccatacacattttcatcagcaagcttcttctgtgcctgaggatattttgccaacttaagcagtaatcatgggaatcattgagagcttcagttattaattcttctttagtcaccaaaattttactagcataactatatatgcaagtaaaataataccccaagaaatgccaagtgctattctgttctctaggaggaagtttagaggatttgtagactgagtagcttggatttattgccatattctctgctaaaaagtctaaaaataaaaacgttggcatcacagttggtgttctgagtcatattttaaggcctgcaagcttgtaccttataaaaatgctattcagaaaactctaaactgcacataaaatatatcttcgtttttgtcaattcccctgctggcttctttcttttgggttttctttcagagatatctaggactagaagtgaagacatacgaatcctcttgaaatgagttccagacatacaatggaagcagcattgcttctaactgagtcaaagatccccaagcattttctcttgtagcatgcttgaggatgattaagtaactcttggaatccaaagctcactacaaaaaaatctatttgaataaaaattcgtgattatatccattccaattttcttccattcaactcaaaataatgccagcagtctgtttcttacaacattgactacattggttttatttacatggatgcaattattagttcatcaagaattttttgagtacctatcatatgacaggtgttttgctaggcagcaggatataggaatcatagagaccaggtcctccaggagcttacagttcaggtaggagagaagcatgtaagtatctttattgtaatagtgttgtaatatatatacaaggtatatgcaagggcagcctggtgcatgccagcctggggatgttaggcagaaatggacaagaaggcctcatttgagctgcgaccttatacagtggccactctgctgtgcccacagtaagggtgggcatggctgctacaaaggtgtggagatagtctgtagagaactgcaagtggatttgtgtggctggaaggtgaaatgtcagctgaaaagtgggggtaattgagccttgtatgtaacacagagacttcctcttgcaagccagtagtcctcaatcgtatgcatttcaatcatctggaaagctttttttaaaaaaatgtttatacctggatcctgggaccattgaattagaatactcaggtagagcatgtcctgagcatctgtttttctttacattgtccatggatgattctgatttgcagctagatgacctcttatttgttacaggtaatgaatatccactaaagaaacttgatcaggggcatggcataaccctacacgttcaaactgaaaactggaaagctttgtatgaaatggagtccatcttataaacactacttctataggtgccagtaggtcactatcatccccaattcagtacacctgaggggtaattgttctagacacaaagaaatagtaggatccaatgaccacggcatacctagccctgttatgggaactgcctgatagtagcgtctgcctcttcatcacaccattgcaaaactgaaggctgataagatttcaatctctagctatttaaggatccttttaatgaaacaagataaactttatatttctaattccagttatatcatcttgtcttatagtgatccgtggaaactaaaactgctattctgttcaaccttttccacatcacaaatctgggtgaaataaataaagctagccagccgactttcttcactctagcaacattgaggtttaaaggagaaagcttgctttgaatacaccatcagtaggacctatctctttattcctggttttctcttgtatacaattcagtgattctgtctgctacagtgatagagaaaagcgatgaaacgttccaatcaaaataggaactgctgaatgcatgtttagccctgagaaactagagaatgctcttgcagagaaggatttattcctcaggagttaaacttgaaaggaaagccatctttgtagaattcctttgagacattttagtgcgtcttgcctcaaacaggcctgtccactggctgcttaaaaggaagacagattttattattaaataagaaccagcaaggaaagatggggaaactgtattgggtctttgagtattccggctggaattgggatatttcttcttttcttgaaaagacatctggccacatgtattataggcagacatcaccccccagtgttccaaaaactcagacaacaataacaaagtcagatgtgcatgcccgtgtcagcccagaaggctaaccacccaccctctacatgtgcttctggggttgatgttgaaggggctgagggaggtttgttatcacagcggtaggcctgtaaacagtctaccaggataatttctgtttcagctgctggctttttaaatccaactctgtgctaacatacatggtgtttaaaacacctaattctgtggtcatgtcatttagaaatctttagtaacgttttttgaatgttaattgtatgtatagttccactggctcttacaaagagcagaacgacatataaaaatgatgaattgctatgccttctcccttgtcttcttagtgtataaacacacaaaaaagaaatgaaaaagggtaacagctatatatagttgactcttattctatctaaagaagggaagacaagcagaccacctgagccgggacaaatgtgactgctaggcagaaccgtgagcagctataggtctaagtatctcaagaataagggaaacttgttgggcatctaacagccttctgattactgtcagatcagtgagctgctcatacaggcctcaggacagctgattaagttggagataatcagtgtcacccaaacacttaaaaatggaattggctgtctcagaaagtatgggtagcgagtagcccatcagagtatcagcagccattaaactcaaccttgtacaaagtgggcaggcattgaggaaatgtttactaagtaaatgtcaccatagcaataccgggaagaagcttagccagatgacggcaattcttagaaccagttctgtgtaggaatccgtactgggtatcatagcaataggaaagtcacaagtacaaaagtgtatcggagttagactcttactactttttcgctctttattctatttgttttttacgtaatatatcatcttgaatatattctcattataaaaatgttgaaaatacagagaacgtatagaggaagaaaaaatctcttagcgttgccacccaaatgtagcctcctattatctccctcggtattttcttgtggtctttattttcagtgtacatttttacatagttctatgtacttttatattcagcatttttctcttaaccataaatctttttagaggtgatattattcaccacatgaagtaaacgtattttggtcttaatttgcttaacttttcttctactgttgggcattgaggttgtatacactttttcctattataaacattgagtccaaaggtatcaatattttatagaattttgttagtgatagccaagtaggtttcccagatattttaacttatttatccacaatatgtgtcaaaattgccagtgctgcttctcattaggtgttgatatttgaaattgtttttctagatttcataagtgagaaatagactggatcaggtaagagagggttgattggagtgatgcaagggggcagctctcagagcccctggcaggcagcaggaagcactgctgtgacacaggagggcctcccactcagcagacagagccccatgaagatctctcttctccccacccggccgcccgcctgccccactgcagctccgcatcttcctggtctcctttgggtttctatttgcctgcccctgtctcattgcatgtgcgtgctgtctgtctgcctgtctctgtgcctcacactctgtatttctctgggactcctgtctgtcaatctctcttatcttttagtctctccctccctctctctgccctgccgtcccatactcatccctgcttgcccagctcatggttaaaaatagctgccctggcagtcctacccatctactgagttcagtggtcttcagagtctgcctaggtccctgtgtgtctaacttcgaaatacttccacgttctgaggaagggaatctggttggctcagctaggtcagcacagtggctaccctttgttggggttactccagtggacagggagacatgaggcacagacctggatgctgattcaccctgagagtggaagaggctggttctaggagcaggttgctgaggagcagagacgctcttctagctctgactccccagtcctgaggagctccactctgtagagagaggtcaacaggcatgcttgggctcctctgtgggcctagtgatggccctttctagatagataacctattgtgattgatggaaactatcttctaggattagatttgctgttctgaactgaggaagattcgcttaattggttccacctctgattctgtgtgtgtgttggggcggggaagtatgtagtggttatagtgtagagtatctctgatggtcatgtttatatgtttttttctttttcttattcttttcctttttttcttcgactgccaaaactgtaagcaaacttgcttttttgtttgtttgctgcatcgaccctaaagtaataagcttgctttggaatcagaattagccctgtggttctccctgagagggtggtctgtcactttcaccaagagggtgagggcagcagggacagggttggacagagatccttgacctgaagcctgaagcaggactaggggattacgtgcaaagaacagagttcatagcaaggctgtgaagcaggtggtcaggctagaatgaggtcagactgaggaccagggcagagctggcaggtctgtggaagtcacaggagaacaagaagagggcataaggaaatggaggaaaggttagggagagcagcctggcattttacacacttcccttggggtttactgtaatgatgaatcacatagtgcattttatgtatttaattgtttaatgagaaagtcatgtttctagaatcaaactctaaaagcaccacagtatccaccgaaaacttaatttccctcgcacgctggtcactcagccatacaattcccctgagagggaattgttccctggttgagaatatcaaggcataaggaagcagatttgctcaaggtcacattgctggtaaggacaagccacctttctaacacgaaagtttgtgctctccccagtccccctcactgtgcccttctaggactttttgtaacacagtccagatagtacagtgcttgtagtttgtatttgttaaccttctattttctgtttctcacctaaataatgtcttttctgaggccaggccaatcctgttaatccccgtcacactgtatgtaagttactttacagtatttaaaaagtaaattgcattcacaatactaacaatgttagaagtatagagattccacaagcgtttttgaggtggctgctgtgtaccagcctcttggctggacgtgagacataaaggtggtgaaaaattgaatctgtattgatcatagatgttgagaagctgccaaaagtcacgaatctacttttcctaatctacttttcatgtatcttccttacaaaatacatttttgaaaaatccagcaatttggctctctgtaagaatggaaggttctttaaaatcccataatgtgaactcttgtttgttttcatttccaaattagcagaattgtactgaggttagaactctgggatagtactaggaagccaggtccttctctcagcctttagagatcccttgttaaggatttatatgtctcagtgggagtaggatgggattcccaatgtggaccacgccctgtatttgctcctcagtttagggtaactgagaggtaccctagagggtacactgtttctacttcctgctgctgcagccaggatgctgccacttctgagctacattctggagttgaccttggaaggcgtgtttagctttaagtgcattgcataggcctctctgggctggcctgggcacatgaccaaacgtctatgaaaaaatgtgttttgagtagtgtcaaagaggtgatttacaattaccttttggaactcagcctcaaaagttgggattatctgtgcttgccctattcatgttgttcttttgtctgcagacaatgcagttcaggcttttcattagcctatgtcattctttggattcgtgatgggttggtttgtgtgaatatgggtgtacatatgtgtatctattttagcctacatcgtggtatttctgagaattagagttgttgtaacttttttttttaatgtgggcttgagtcactgctaaatgtaaagcaagcatatagagcaaagatcaaccaattgtttcagagtttgaaagtcattttcatgtcacatccagattaggcttttagtcattctgtaaagattttcattagaccttggattacacataaataaatgctcagagatctaagctggtgctgcctcttgggatagaagaaagcctttgggatcttagaagaccccaggttcattactggatataattgtcaacaacctctcaagtgagttctaggatgactaatgtggcagcaggattgacaagtcttatcataatttgtacaggtgtttccatgtgtagaagttgaatttgacctctgacttttgctgtttaattctttcatttccatgagttcactagatggtatagattcaataggctttatataggctgatccgaaatcacagggtcccatgttgattttatttggtcatttgttttcaactgagcttgctattttaaagcagtcttggtggggttttcataacttccttgttggagttttcaagggatttttacatttagatataattcacatactacagaatttactcttctagaatgtatgtcagtaatattttttagtatattcagagtcatgttaccatcaccactatctaatgaatttctatcactcaaaaagaaactccatattactttgtttccttctgcctctagccagcccctggcaaacatttttctattttctgtctctatagatttgcttattctggacattttatataaatggaatcatacaatatatggcctttaaaaaatctgtcctccttcacttagtgtaatgttttacatgttcatacatgttgtagcatgactcactatttaattcctttttatggctgaaataatattgtgtggatattctactttttatttatgtattcagttagtagatatttagctttttctactttttgactattataaataatgctactatgaacgttcctgaataagatttcatgtagacatacattttcatatgtctgggtttatacctgggagtggaattgctgggtcacatggtaactccatgtttaacattttcaggaactgctagaaggttttccaaagtttgcattcccatcaaactgtgtaaggtcccagtttctccacatccttgataacacttgttattgtctgttaagtaaataattttatataaacattttagtggtacatcattgtggttttgatttgcatttccttatggttaatgacattgagcatcttttcatgtgcttattggccattttttgtggcttctttggaggagaaatgtctattgtagttatatgcctgtttaaaatattggattatttgtttttttattattgagttgtaagagttctttattctgcatactagacccatatcagatgattggcaaatattatctctcgttctgtggattgcctttttattttcttgatattgccctttgaagtgcaaaatgttttaattttgatgaagtccaatttatcacttttttcccccttagttgcttgtgtttttaagtgccgtatatcagaaaccacctaatccaaggtcaggaagagttacccctatgttttcttctaagagttttatagatttagctcttacatttatgcctttggtccattttgagttaatttttgtatatagtgtgaggtagggggcccaactttattattttgcatgtagatatcaagttccagcaccagcaccatttgttttaaagacctttatttcccctttggattatctaggccgtttttccaaaaatgaagtgaccataagtgtgagggcttaatgtctacattctcaatcttattccactgatctgtatgtctgtctttatgctaggacacgttgtcttggtgcctgtagctttgtagtaacttgaaatcacaaagtgtgactcctccaacttcgaaaagattattttttgatgtgatgctgatgtctgtccttctcccacacatattttgagatatcttttctttgtcattatgaagtcatattggaaatgctatttgaagtggccatgaattcattttcagatctaagctcggtatttatataaaaggtgtggatttggatggaatcagacatattccaaaaatttggccactggctctgtttcttaactataaaatgaaactctaccaaatcaaagggtaattcggggaattaaataatgtgacgtatgtaagagcatctagcattgtacctgggaaatgttagttacaaaatttatgtctgttgccttttctatccccttctcatggatgcagaagctttcttggtaccttgtaatacgattctaaattcttccttaaaatcattcttcttccatttagaaagtattttctccagggtcatcataggaattggaattactgaattttctagtctatgctgtgatatttgtataatgtttcagactaagttcactgccttatctccagtgtctaaaactgtgcctgaccaatggtaagtgattagtgaacatttgttaagtgagtactaaatgttgatcccattttcttatttgcttgggtaaatataaagttaattgcttgtacatatgtttctaagtaagcccacataacagttgtgtgaatatttaattatgaggtattttccacaagattttcatgagtagtttatccagctgacttagtgttttaactctctcgagtggcacttctttcttccaaatacatacttccatctagatgttttctctctggggtaattccagactgaaataggaaggattgagtgtgagtagtaaagtttaaacagcaagtggagaggagagtgggatgttggggatggcacagttatgtggtcatgagaaccaaggagggaaacttagggaggatagggtcaagtaggaaagcacactgccagcttctgaacattgctatggtgtttatgtgatggtcagtttctcatgactctcttgacctctcaggtctgtacatgaaactgtaaacaaagagtatccaggtgtcattactggctgctgtgagcctgatacacactgagaaacagcacctgtgcttgtcattatgtgcgtcgaggataagccaacctttataggtaagagtgctagtcattttatggactcataggatcactgaatttgaaagctagacaggatcgtcaggctgaaggaatcttggtaaatgggtaagtgttgcctcagagaatggattccattatcaaatagatttggaatgagttcaaccaagttaacaggttcaggttttgttgttgctgcttttgttgtttaacttcagggtttctcagagcctttaatgtgccaacatatgttacatggtgtctttaagagtgaatgtttaagagcaggacttcccaaagatgactagtctctggagtctccccctagcccacagagagccttctgggactagtacttgccagggcatattttgcatagttatggttcagggtaatgcctttatttctcagacatgaagtcttattctttagtctttttgagttgctgtttctaagaaaggtcatgtctgctgatacataacatagaagctgactgtgtctgttctctaagaactgtcacaaaagtgagagcttaaattaggagttacaaaaaaattgatgaaactccctgtttaagtgtgtgtgtgtgtgtatatatatatatatgtgtgtgtgtatatatatatgttacaaatatatatatatatatatattataaatatatatatatatatatatgttacaaatatcctatgctccaggatatcaatatttgggtttttaaaatctgttacttgtattgcgcagtctgtatggtgcctgataatccttgatatagtgaacttgaaaattcaatttctgcagattttgctctgatgcacaccccttaagatggagaacaaggaagaggcaggaggatgacctatggaaaacatgaccactgacttctgctatagaataaacaaaatatggaccactataatggtgctggggtagtagataagcttgttgtcactggaatgcattcttggagttctgtggtagagcaaattgtatatagttacaaatatgggtgcagccccctctactcctgggaattctttttccttccctctctctacccatatacccatccttccttccttcttctaagtcatcaaataggagttatttatttaattttctaaaaaggttggggggggtggaaatggaagacgtcttagtggctgccagtaaacctggtttgtgtgtgttggtatatgtcaccattgtggtgtaacagcagcacagctgggaatcccagcatgggaagtttccatttacatctctagtgaaaatacccaagcaccacgtttttttcttatctacattatcgggaggtttctacacttccctactagatgatggtgtcgggaggaatgatattaggcagattctttcaccttagagcatggcacataatgtttctccaacagttgagacacagccagagaagagggtcagggaatgaagaagactgatggaggtatatgagtcagaatctgaggttggggagtgttgggggaagtaagagaaacacagatcaggtgaacaaatggaaaaagaaccatgcaagccagaaaggtaattgctgttttatttttacttcactgatgttttcttaattaaaaaaaattaggcaaaagaaaaaaaagttcaaaggagaaagtaaaatattacccaaaaaagctcaagcggaagataacaaatgttaacatttatttcagccatgcctctgtacatactgtgagagaggaacagaaggatgggtagataaatgatgggcagaaataattgtgtaagactgagttcaaacaaaacatggctttaaaagtaaaacattcaatttgatcttgaatttaacaaaagggaaagaaattgtccatcttctgaaaagtaattctgtagcataagagtatttgttctcttaggttcagaagagaggtgaaaaccatcacaaggttgggagtcaggatggattgagaataacaggacaacatgataaacatcgagtgccttctccctttgtccctgcctggctttctgatgtatgctgcttgttttatttttgttttgttaggctttatacttttaacactctgtagctctaatttcccctgggtatccctccacctatttattcctaatcaatgtactgttaaccattggtctttttactatggcttttcattcttaaaaatttaatgggctgggcatggtggctcacgcctgtaatcctagcactttgggatgccgaggtgggtggaccactaggtcagaagttcgagaccagtctggccaacatcatggtgaaaccccatctctactaaaaatacaaaaatcagctgggcatgatggcagctgcctgtaatttcagctacttgggaggctgaagcaggagaatagcttgaacccaggaggcagaggctgcagtgagccaagattgtaccactgcactccagcctgggtgacagagtgagactgtctcaaaaaaaaaaaaaaattaatgtttggtgggcaacatggtgaattttttttttttaaagaaaggggttttgggtgccatattccttgaatttggaaacatttcatgtttgaggattattatgtttggaagattattatttttgaaagacaacttttctgttgccaaactgtcttctaaagaggttgttcacatttctagtctactagcaatttatgaaaatgcccaccttccatgggggaattttaaagactttgcctgaaatgatagaactctattgggtagtggctgaagtaagtttgagttggtaaatcaggggtcagattatggaaaaacttacatgttggagaatcagctattttcttggtgagtttcttctttctttgacagattaacaactttccagcaggccaaatgagaattattgggtagctttgtggagctgtgtgggaaccctcttaaaagatttctcattctctctccctgcccactgtgaaaaggcacttggctgactgatggtaggttttggttgccatctgaagatagtagaaagtggcaaatactttcatctaccaaaaaattggcatctgattttttttaactgataacttttttggttacgaagtatgatcttttgccttgcctgacagcctgttgtcttgatactgagcagtccttataaaccattcctaaacgatttccagttgaagttgtatgagctggagggtctggtccttgtagggcagctcatctcttgtggtgacacagtttgtagtacctgtaagtttacattgggctttttactaaaaaaccctgctgatctcatgtagaaaaccaatagcctgtttcatcttttgtttcattttatccagacaatagaggaaatgggaaagaaaattgcccagatgtgacttcacacacttaagttttggccatcttactttgtggtgactcagatatacaccagccatcgactttttcagaggaggtggagcaggacacacctggaagatttcaggaggcagaaatgtgtctaggtttgcccattttgtgctacaaaaaaaagggagaaaataagtggtttagaatggtatggtctaaaactgggctctccagtatagcagatgccagtcatctgtggctatgtaaatttcaataatttaaaatgaaataaaatttaaaatttagtttcttagttgcactggccacatttcatgtgctcactggggcaagtggctggaagctacagtattggacagcatcaagttctactggctagtagatgctactggctggtagaacttgttgctgtccaatactggctctgctgtccaatggctggctctggtctgggtgctgatcttttcttttccatgatcctgtggggttcattccagccttaagagttgggctcttgtctcttctcccttgttacctctactttcaatcattcttctgttcctattcagatgacaagctgctttccatattgccttgttggtatcctgttgataaccctcagggaagcccatttgtggtgggaactagatctttgcactgcaatattaaaagaacaaccctctggccaacacccaagagtctgcatgttcttaccaaaggattgaatggtgcttgcgattttgactctttcgtaatgaatctgctccttaggaaagtttcaatgcatatatgtagaacttttactttactttagctctgttttccatttctgggtgtatgtttttgatgggatacggtccttggtccttgtcctcgtcctagttgtatccccactgactgaccctgttaccttagtaagatatttaatttctctgtggctcagttaccacatgacaatgcactcccaatcacagcttcaactattatgaagataaatgccaaatgataagggagaaattttgaggtctgggctgaaaggaatgtttccagggtttttaaggggttcatgtgtcttttcatctttgtgcccagtcctagattcccagtgtcactttgtgatgtgtctgtcactatcagacacataccggcctttgtcagctgattggcccccacactagaccgtgtctgcttcttgtaagtgactttataagggagtcagggtttgttggtcaaggagcccccttctgagtctgacctacccagcaggagtgggatgctctggtagcaggagcctgctagcctgagggacaggagaagagagtgttgctgctgacttacctaggagactttttcaccccatgttctcatgcttcccacctgctgagtctggaggtctgccagggcttcctgcctggggtttcagcgatctaatgcagtgtcacaaacaaccccaaaacttggtaaattgagacaatgacgatgaactggtaggttaatgacaatatttatgtatccctgacatctttaatttgggtgggacttgatgaaaagacatagtttctgctctactcactggcaactgggacagcaggaaggctggaggctgggacatttgaatccttgctcagtcacatgtctgcgggttgatgctggttatcggctgaggtgaggcggtcgccattcttttccgaatggatctctccatgtgttctttccatgttggctagcttgagcttactcacatcgtggtggctgagttgaagggcaagcaccctgagacaacaggacaagtggaagttacattgccatttctaatgcagcctcagaagtcacgaagcatcatttctgccataattagaagccactcaaatttgaaggatgggaatatagaagccatctattgatgaagaagtgtcacggtcactttgttagaggagcatgtgggatgggatgtacattggtatggtcgtctttgaaaaatacatcttccacacccagtaatgatgaatcagaactggcatcagcttgctctaagccataaataagccttgacgtctgccttgggtctggagactgggtgcttctcattttcaggagctatgattgtcattgttctgtgctggggctgttctgtctttgggtgtgaggatgggagagttgccttttgcatagtactcagagttctttgatgaaaaacggtaagcacagaatggtttattagaatgcccttaatgtgctaaactccctaaatcaatggatgtctgcagtgaatctgcaacataggggaatatgcaaggaagatcaaggccctggttgctgaatttgatttttaaaattaatttgatggaatccagcttagagttttaacacattacttacatcccacattttgacttacattttctgatttgtaattcctatgaactattattttttggtaacattcttactagatgtaaactcctaaagaattaggatctatctttccacaaatttttaaagtttgataaatggatacttgagaatattttcttacttcggagataaaatttagtaaaaaccttctagtagctagtgtgaaggggagggaacacaggttatcaatttgataaacaaataacctactacctaccgtgtcaattaagaaaaaacaaaaacaaggatgagacagtcttcaaattgcttttgatctatacactctactggagagaataaaataaccatgtcattgttagcattgggaacagaggtgcttttaggtttttcttgccttttagctctagtctaccagtaaccaccccacctttttaaaacctgtttactctgccttttccttttatgtctctcttttttccagtttgcactagtttaaaagtgtctcaggttaagttttttgcagtaatctttctttcccctagaagtgagtaaaacttcctgtatccctttttctccccacctatgttccctaaattagtgattctcttacaaggaattattatcgcccctgcagttttggaaggatacctccaaaatatatcttggggacttcgatttatagaatttggtttaagcttagattctgagtcccagggttatttttagttaagtggacaaacaaacttgaagtgtgtacatctgatacatgacccactagggtattttgtttcttgttatttgagagtgttcagttagcacttatagagcattacccattgttagctggctgtttacatttctgaaaagatgataagttgatttttgtaggaaatagggaagttttaaaacttcatgctcacatttcatagtaactcaattgatagtctttttagataagtaatgaaatgctgcctgtggttgccaattgttaaaactctaccaagcttccgcaagcagttgtcggttaagggagcgtaataacacccactgataaaattcaaaccaccagatgttattttaagttcttgggtggtgctatcttttcttaccctttaaactgctaagtcacatcctgctttgcatttcaatttggtataaattggatgcagcagacataggtctggcataagatgctcaaacaaaattaaataccaaaattaaagaaggcagttctgtggagtaaatctgtcatttctggatgcaagattatgttagagcagtggctcaacccttgctgtgtatccaaatcacctgggagtgtctcaggatgcccttgccctggcctcatccccagtgtctggaccagttagtatgaaatggcaccaggctttgggattttgtagaagcttcccagggtgatcctgtcacgcagccggggttgagaaatgttgcaggaggtgcccctcccgacccagctcacagctttgtcctccatgcttctctctacctagtcaagccctatccacatcttcacggctccctgcaggccacctcttcctaagctttttctcacaactccagccccactgagctcttcccttgtgactgcccatagcacctaccagatggcccaccctggggtgtgttctggcttgtttcatttgtgacatcttatctccttgatcacagtggtttcctccttggattaagtttctgtcacttagtttccatcactgaagggttagcacagcagtggacacatagtagttactttataggatatatactgaattgagttttcatcagtgtgcctgtcttctttttgccacctgtctttccactgtagcttcctttattagcccacatttattcataagtatttcttccttgtaaggtgttgaaggacaagtaagagtagctaagctgcagaaggaggaggaaaactcagcccatttctgatttctccattcaggaatggaggagttgtcataggacctatggactcatctctctccattcagaacattgattcatcctgatctgtagtgactcttgggaccacgtgggtgataaatgcaacatgaaaggggctggcttgctggagaaggtgaaaatgatttgaagattggatgtctaccatctatcctattttgagcatttgggattatttcaggccagggtaatacacaccttcaaattgaaaatagtagctttcggccagccacggtggctcacacctgtaatctcagcactttgggaggccgaggcaggtggatcacctgaggtcagaagttcgagaccagcctgaccaacatggcgaaaccccatctctactaaaaagtacaaaaattagccgggcatggtggtgtgtgcctgtaatcccagctactcatgagactgaggcagaagaattgcttgaacctgggaggcagaggttgcagtgagctgagatctgagctgagatcacgccactgcgctccagcctgggcgagaaaagcaagactctgtctccaaaaaaaaaaaaaaaaaaaaaaaaagaaagaaaaaaaaaacagtagctttccttattttgtcaaataatgaaaaggattcttactgccataggttcctgtttctggcacaggaagctggccaggacagaggtgattggcagctttctgttaagacgtacagaggtgacctaaggttcctaatttgaaggcatgccagcttcttagggccaatgttatttgtgctatacctgtgtaactgagagattcaaaaattaggtaactttaacacgattaaagtttatttctctctcatgtaactgttcagatattgttattccttggctggcatggtgacactatggtcttcaaccagtgtgtctttcatttctgggtccagctatcaccacctcccagctctcaggaatggggaaagggcagggaacatgtgtatctctttttaggaccatgacctggaagacaaacaactctgctcacatctcattggcagcccttagtcacaagcccctaccaagcggcaaagaatgctagaagtgaaagcctcttattagatgcccatgaaccacattaaaactcgagagttctattattaaagaaggggagagtggatattgctggataacaagccaaggcatgcatgctaacttaccaaaatatcagatctatcagttatcaccccgttcactggtttgggtaaaaacactctaaatgtcaaaagaaacctcaaatgtatcatgagttctgtgaagtcatggtagaaaagtagagaacttgagggggatgtttgatgtctctactttttggggaaaggtagaccatgtgcttgaaaaggacacgcaaagtaactacagcacagatagtgttgataagccgagtttggtttgtggagcaggctcttgccatcttttgaggacaagtgtgtttggcaagagatttgctaacttgtttaagagagttgaactgaaatttgatgggaaggaaaaaacgttaaaacttgattggctagagaacaaccggcagagcaaagataaaaagaccaataacagaggaggagaacatcagtaatttctttttaaaaaagcctgggcagctggttggtaaaatacctgcagctctttgccattgtgcagcttatgagaatgaagcaaaataaacttgaaacattaaaacttggatatagatagcatcactggatctgtctcaccacggttagcgtggttctcgtgactagaatatgattttagaaggggatgttttactgtaaagaagcagtcttggggaaatctagaccttaatgatgaatccctgggtaaagagggcatggtagggaagaaagattgtaataggatcagtattatggatggccagatagaggctatggagggcgctttcttctcagaaactgaaactttagaatgaataccacatgtgctgataaaaaggagattcaatcagataatcacccactggatgtttcattcggctaacttctgataaactcttgacttgttttgccgatcatttaatttttaagaagactgaaaaaataatgcagagaatgatagctctgggtttctttctgagccaacaaggaagcattaactagtgatagaaagtggcaggaaccaggaaatgaaatccccaaagaaggatgctttgggcataacatctctatggtactagaaatatttgaaacaagtcagagaaaagagagaaatgatgtctcttgtggccaaagacttaaaatggcaaggagatctcacaaggaaggaatagctgaaatattctgaaatacataagtaatcccaaatgattccagtgaacagtaaagacagaagtctcctatgggaataaataaatgtgctcacactgagaactctttccttggctcaacaaagattgctaccagtctttgtaaattactttccacagaatgtagaggtgaataaaatgcagtcccgagtgagatatagacccaacatctagcagtcaggatatgaagagtgagtcagagtgcaggaaacgtgactaatactttcaggtagcgcaaaaggaaagcagagtccaagaggaaacaaacgcatttggggtgggagaggggttgagaaaaggcttcatggaaaaggcaatgctgaaagtgatcttcggaagatggaggactttgccacagacggaagagagaaagtgggttaggagggtgctccataaagaaggactcactaggagaaagggagagtgcagaatacagggtatgtatatatgagttgttagagatgaagtttgagtgataacagccaaagtgtaactgagtgatgtctggcaaggactatgctgagtgttttacatgcattattttagtcaatcttcacaaaaccctgtgaggttagtacagttattcatgcctgctttcacatgacgaagcaactcagacatttagccacagagtgagaggtagatccagagtccaaaaccagtgaaatgcaactatgtagtggagggttttgcctgccaggccttgctattttacttaagcttgtaggcattgggaatttggagcaggggagagcctggcgataaattgaactagggaatggatataaggattgaagtgctgggagagaaaatgtggagtcagttgcagggcctaatggtggtctaaaatggataggttgttttgagaatagaagaatataaaacacattggggggtgatgaggtcagtgtcagggagagagagaatctacactactgggggctctgggagagggagtttggttggattaatagagggtgggtatcttaatcagagtcagggaagccagtggcaggtattaatatcagcatgagggagtaatgagcataggcttgctgttccagtgatgaatccaggggccaacaccaggctggggactggagtgtgggggtagggagcagtgtagaggctttactaaggtaaggggcctgtaaagatgatcaagagctgaagtgcatagagagaagtggatgagggacaaaactttggtgagtgcccatggaactgggagagaaaaggagacagtaagcaacactttaaagttaagaggtatcagcactcctgtgttcacagaagcactgttgatgatagccaagatgtggaaacaacctaaatgtccatcaacagatgaatgtgtgaagacactgtggtaggaacagagtggccaatggcctggagagcaacatgtccatgtgtgattgtgactactgcaataaatacctcactcatgactcttcatctgtgcaaaagatactctacagtgatatctacaaagagaatatgaaagactgctgtcagaatggggtggaagagcaggctcagagcctgatggacgaaacaatggctgcacttcaacaaggaaaggttcctcctactccattctctgcctctccccagcaggggcaatgatcccacctcctcgcaagtctcccggctcctctttgccctggtatgatgcctgcacctcctataagtggccatcccatgatgtcagtgatgggttctcctcctcctgggatgatgccagtgggacctgctcctggaatgaggctgccatgggaggtcacatgccaatgatgcctaggcctccagtgatggaacctcctacctgctccgtgatgatgcctgctgagcccagaatgactcactatgcagatgaggacaggagggaggcctctttatattagtttcctattacttgttctgcttcaccaggagatcatggtgctgtgactctgggtgttttctttttttttgagatggagtctgacccaagctggagttcagtggtacaatctcagctcacagcaacatctgcctcccagattcaagcaattctcctgcctcagcctcccaaatagctgggattacaggtccccgccaccacacttggctaacttttgtatttttagtagagacagggtttcaaccatgttggccaggctggtcttgaactgctgacctcaagtgatccacccacctcggcctcccgaagtgctgagattacaggcatgagccaccacgcctggccactggatgttttcttaacagcatggcaaggaagacttacgccctcttcctatcaaagagaatagttttggagcccacactcatcagtatggagtcatgactcttagccctggacgcgtgtcagaatgtcctacggagcttattccacttcaatcatggactctgggctggggcctgggcagcagtgttttgtaaaagctcttcactagtttgcagccagggttggtaataattgatctagacttttcagaaatttcctgtctgtttctaataatcttcacagaatctacccaattttcattttctgatacctatctcactctccctcatccggcatagcttactgtcaggtcccatgaagactgaagtcattcagtcccctcatctgtttgggctaaattggtatccagaacccatttagcagagctgggtgcacatttcctatctcttctctgtcgtgggtttcaagtttgtcttctctgtggttattttattctttcccgttagtacgtctccttgaagaaaaaagatggaaaacaactgggattggagcaatcctcttgacccccgatgctttgtgaagagtttccacacccagaagcttatcttctatttgtgcatctggctctggctatgtgtccacaaagccctttagttttcaccactgctgtttgcaagccttgggttgctcctgataccagtcctccaggcattattccagcatggttgtgcaacactcctgattatgagcctggcagtacactgttctagttcctcttaactttattcacacacacacacacacacacacacacacacacacacacacacacacctgtatattatgatcagaacacttcactgaaactctgtatccattaaacaataactggtattctcccctccccccagcccctgacagccaccattcttctttctgtttctatgaatttgattattttaaatatctcatataagtggaatcatgccgtatttgtccttctgtgactggcttatttcnnnnnnnnnnnnnnnnnnnnattttttgagacggagtcttgctctgttgtctgggtggagtgcagtggtgcaatctcggctcactgcaacctctgcctcccaggttgaagcgattttccgaagaagcttatcttctatttgtgcatctggctctggctatgtgtccacaaagccctttagttttcaccactgctgtttgcaagccttgggttgctcctgataccagtcctccaggcattattccagcatggttgtgcaacactcctgattatgagcctggcagtacactgttctagttcctcttaactttattcacacacacacacacacacacacacacacacacacacacacacacctgtatattatgatcagaacacttcactgaaactctgtatccattaaacaataactggtattctcccctccccccagcccctgacagccaccattcttctttctgtttctatgaattcgattattttaaatatctcatataagtggaatcatgccgtatttgtccttctgtgactggcttatttcacctagcgtaatgtcttccagagtcatccgtgttattgcccattgtaagatttctttagttttttacagctgaataatactctgttgtatgtacagctgtatggggtactggttcggtgatcgccacaaataccaaatttcatggatgttcaggttcctgatataaaatggcaaagtattcgcacgtaacctatgcacatcctcctgtatatttaaactatttctagattacttacaatacttaacacagtgtaaatgctatgtaaatagttgctgtactgtgttgttttaaaatctgtatattttcattgttgtattgttattgctggaatacttttgctctgtggttggctaaatccacggatgtgaaacctgcagatactgcgggctgactgtatataccacattttcttttcactgaaagagttgacagttacattttaacatttcaactgtactttttctgtcccacttctcccctccaaaactactgtctttgttaggaagagggagtaagtcttccttgtcatgctgttaagaaaacatccagtggccaggtgcagtgactcacacctgtaatcccagcactctgggaggctgaggtggatggatcacttgaggtcaggagtttgagaccagcctggccaacatggtgaaaccccatctctactaaaaatacaaaaatcagccagctgtggtggcatatacctgcaatctccgctactcgggaggctgagacatgagaattgcttgaacctgggaggcagaggttgcagtgagccgagatctcaccactgcactccagcctgggtgacagagtgagagtctgtctcaaaaaaaaaaaaaaaaaattggtggtgagaacatggtagccagtggggaggacacagcctgatgaagtcaaccctacagcaaaacccactgtcctgagtgatgtctgtggtcaggggtcaggggacatgtgccaatagtgaggcccatgtgaccaggaggagggactcagcattggagcaaagccctcggcattcaggtattgagtgttggcagacacaggggtggatgtgtagcaaacaactttctctttttttaaggaagatgtcagacttctgaaaagtccgcttgaggtattcatcaacatatctatttggtgatacccttgtgaacaaggtagaaaaccaagatctgagtcaatagcatttcttctggtgaaggatagggttacatttgcatagaaatcatttggaaattatctttcccttcttctcccaatctgcctgcaagtgcgctctcccaggaatcctatcagctttgaattgtctatcggtgaacttcaaaaggctagtagtaagcaacattggccacttgggtctcttgatctcttcctttcttcactggcaagtatctttgatatgtggctttctgattctgtgagctagaggctattatttgtgagtgtgagtccacgctttcctcatttttcacttgttctaaggatgtctgtggccataggaactgtcaagttgaggctgggagccacagggctcacccagaagatgaaatggaaggcatcctagtgttggaagccaagtattaggttggtacacaagtcattgtggtttttgccagttagaaaaccaccagtaccagaacatcttgccaacagcccagcagcaccttgtcttactgtctaacttaagaaaaagtaatttatttacacattgtcttattccacggagtttttgaagtggcctccaataatacacatactgcacatggaaaaagtccatagttgagagaattggagcacagtgacaatagagggaagccaagcacagagaaatactcatctcttgctactgaagattatcagtggtgagccatcaatttgaccctctgtccatgctagtacctcagacaaagagggaggtgctctgttcacagtctctaaaagctaagaataagccagtcgtttaggtgtggcattcaagagtcctttctttattattattattattattattattattatttattttctcttgtaaatgaccatagaagagacatttaaaagaagcctctgtacagtgtaagttggtgtggccgttttgaatagcaatttggaatatctagtaaaactaaaactagtcctaccttaagatgcagcagttccacttgctttagaaaattatcatcacagcctcatggggagcagatacaagtttgttcattgcatcagcatctttagtaggaaagagtcagaaacaactgaacgaggaagttcaagacatagtcatgttgcaggaatggaacagaatgtgtgtttttgtgtgtgcaataattttcagtgaaaataagccagttgcagaaagaagttaagtttaaaaaaacccagaaaaatggtgggtatatatgtgtggagacctgtgaattttggatgatagtaatatgggtatttgtatatatcctttgtgtttttctgattaaaagagtaaaatacctattgtgatgttgtgcaggatagtgaccagtacatcctacactacctaacttatagcaatgtgattgccttctaaatggtcttatatgcattagctcatctaatcacctcaacaacccctttcagggagatcctttaattattcccattttgcaaatgaaaaattgagatctagagagactaaaaacttgcctaaagcaacttagtaaggctggccttgaacccgggcagtttgagtccacagcttttagtctttattattactgctctacaaaatttcccagtatcgtacagtgggttggttatttatttattggcagcaattatctcattgtaggtcatggttatactcctagaagacaatgcagggaaagcagttcttagtgatcagaatagggtagttccattatcagatgatatagcttgagcttggtgcacacattgtcttgtctttttggatcatttaatggtggctcacagcccagaagcaccttgtcaaccctggtcctacaccagaaatacctgtggaggtttaggaataccaaagcctggccccaccagagatttcaacataatagatctaggatagggtctgtttatcagcatttttgaaagtgtgtcacgtagtttcagtatgcactcagagtgtgagccactgaatgataaagtctggacagtacatagttcaaagttataatgtttggcaagagcctggtgcatgggtgttttgtgttgaggatcaaagacaggtacatatgtgttgacttttatgaccagattgcagctaatgtcctatgaaatcatggctcttaatcaggataagggaatgcatcttagcaggttagatctgtcttaccaactctctctctctttttttttttctgagatggagtcttgctctgtcacccaggctggagtacagtggcgccatctgggctcactgcaggctggagtacagtggcgccatctcagctccacctcctgggttcaagcaattctcctgcctcagcctcccgagtagctgggattacaggcgcctgccactgtgcccggctaatgtttgtatttttagtagagacagggtttctctatgttggccaggctgtctcgaactcttgacctcgtgatccgcccgcctcagcctcccaaagcgctgggattataagtgtgagccaccacacctggccatctctctctctttttttttttttttcgagacaaggtctggctctgtagcccaggctggagtgcagtggcaaaacctcagctcactgcaacctccgcctcccagactcaagtcatcctcccacttcagcctccccagtagctgatactacaggtgtgcactagcacgcctagctaatttttgtattaggttcgtgccaatggcaaaatccgcacttactttcacaccaacctaatattttttgtaaagatgggggtttcgccttgttgcccaggctggtcttgaactcgtgagctcaagcgatccacctaccttggcctcccaaagtgctgggattacaggcatgagccaccacgcctggccagccaactctgtcttttagttttctggagagctgattgaggaattttgccatgatgacaaagcttgggagtggagactggaagcacatgtgtctggtacttgccataccttgattaaggagtagctaagcagtgggacaaaatctttcccagaaaagaactcagggtctactctaatccctgacaaatgtacactaagtcctcatgtatcttcattgataagttcttggaaactgtgacttcaagtgaaacgatatatacgaagctaattttaccgtaggctaattgataaaaacaatggcatgtttcctgtggcatatttctggtcacaaaaacatcaccaaacttctaaataacaaagttaaataaaacaacattactcgaggacctgctgtataccaaaggccgaaagattctatgccatggttgtaatattaacctgtggcagtggttttggacttgtgcattcaggtcacctggagaacttgtgaaaaacagatcccagggtccccctctcagttcctgattttgttggtctgtggtagggtcagagattttgcattcctaacaaggtcccaggtgataatgatgctgcaagtcttagggcccctctttaaaaaccacaggactacgataataaaagagggttttagcttcctaccctctgccacgtcacacatacacaaatagaaggattggcttggagtcaaataagaaaggttgaaagctacaggctaagtcagttacgttctcaaactttaagcaaaaatcacccagggcatgtgttaaacatgcagattatcaggcccgtctctagatagaaattctgattcaactcatctaaagtggagcaaaatctgcatcttaaataagaatccggaagactttgaagaaggtggatctggacactttgagaaattgtaggtgattgtatagttatgggcatttatagtgggttgtatgcatttgtatgcagaaatgctaattaacagacaaattaatgtcaggctgcagagacctccatgcccttggtgctcttctcgttactaaatctccaagtataatttacttgggtgagtatagatttcatatgcctgtgcaatctatgtatgccgtaacaaagaagtcagccagtgaccattggtctccagaaatatcttgacatgggtcaaaattaacatgtgataatttaataatgattataatgatggtaataataatagaacagtcaagtcctgaattttagttaaaggaagtaaaggagtccgcttcagaaagaaggaagcccaacttctcagaaatccctatgacctgacagtcccagtaagaacactgagaactggaaagagatgcaagttcccccaaagctaaggcaaatccagcagtattaacagttgcagtgtggttgaggccaggaacattgtcattgccttctcttctgctctgtccagaccacacctagagcttgtctttaaatctgggcatcactgttagagaagcacaaattgaagggtgatcaaagttgaacatctgggatcacaagggctcttgatccatgtcccataagaaatggatgatgatgacaatgcggctgtttagtctggagaagaaaagatttgctgggtgggatgtggggatggtggtggtttcagtgcaggttatggttaaaaaaaagttctgtcttgttctatgtagttaccaagggcaaatctaggagcagcgcatgaaattatagtgagtcattatttcagctctaaatgatgacaaactgtctagaatagatttttaaaaaggtgaaatgaagtgccttgtttctgtcacaggaagtggtcaagcagtgatgatctagccatgttatagagggagttcttgctttgtttaagccggaggttgggctagaattcgttattaggctccatgattctaatgactggtgttattgcgcttgttgttttgtttactcagtgatgacaaataaatggttccagcctaaactgacagccagataccattgtccagctttttgtctcatggaagccgcacgcttcaaatatgcaccaggtgcatttctgttgctggattgggctctgagcaatctgatgtcccctgaagaagtggattgtgaaggccatggatggagcagggaatagaaatggatactctattgtgccagagtaagcatttgagtctttaggcctcttgactcctgtcttgccaaaagtgagaataagatttaaaaaaaaaatggtttgtggaggaattgttagactttaaagaagggacttctgtggacactgagccttagtactcatctcccagaaacttagtactcctctcccagaaacagtcaggtatgggtgcctttggatcagaccagcagttcagatagttcggacacatggacagcacttcagaggtccgggatcaccgatcggtatctgaagttgtgattagaacctgcttccagaaacttctgatgctgaatctctggtctgtggtgcttaaagccaaataaccaaagccctgcttttgaccatgtaacatttttgaaatcagggtgtttcagagggtaccatttgtaaaaagatgcataacttggatttgaataattttattttactaaagaccagaaatagatatcccacttaaaaaatttctaacgttaattcaggacataatttctttatatattttactgggaaattgcaaactatttggaattatatgccatctggccttcatgaaagtcgtttccaactatggaagcaaaatctgtttctcaagcaaaacatggccaagtgtctgagtgcagacccccaggcctaatggattaataagtagctgtgttatatgccactttttgcaatctaccagataatgttgcttttttggagagctagtggtgatgaattctgtggcttttatctttctgcatttatgtcttcttccaaagtaagcacactgctttaatgctttaacactagtctgttcacactcgcattatggattttgggagatgttaatatgttgaaggacacacatgttttaagattctgccatctggccgggcgcggtggctcacgcctgtaatcccagcactttgggaggccgaggcgggcggatcacgaggtcaggagatcgagaccatcctggctaacacggtgaaaccccgtctctactaaaaatacaaaaaattagccgggcgtggtagcgggcgcctgtagtcccagctactcgggaggctgaggcaggagaatggcgtgaacccgggaggcggagcttgcagtgagccgagatcgcgccactgcactccagcctgggcgacagagcgagactccgtctcaaaaaaaaaaaaaaaaaaaaaaagattctgccatctttatttgtttgtagttgaaggaggggtagagcttcttatcttgtgctgcacctgccactttcaggaagccaggagagaggaggccatgagcctttacatctgtggagtgtctattctattccaaagccagacactgtatcctcattttcttatttaatccttctaattttccttccttccttcttgcctgcctgcctgcctgccttccttcctccctccctccctctcttccctccctccctctctccctccttccctctcatgctggagtgcagtggtgcaatctcagttcactgcaacctctgcctcccaggttcaagcagttctcctgcctcagcctcctgagtagctgggactacaggcatgcaccaccatgctcggctaattttggtatttttagtagagatggggttttaccatgttggccaggctggtcttgaactcctgacctcaagtaatccagtcgcgtccacctcctaaattgctgggattataggcatgagccactccacctggccaaatccttctaattttctggggtggctattattattccccattttatacaggaaaaaatataaatcagagagcttaatacatttgtcaaggtgcacagagtttgtaataaggaaacaccaattcaaacctaggtctgactccttccagcacacatatatagtatgtgatgtcacctttacatcttttcccaaattgtgttatcttttctaagtgaaacctactaacatgagtcttaaaatcagcctttgttgccaaaatacttgacagtgcgttggtcatttattcttccccattctgggtagaaatcagggttctcttttcctagtggaagccccaggacagcttatgtttgcatgtcatgtgtccatttgacttttaaccaaaacactagcgtttcacacagtcctgacccatcagcttctcaaaggtgggtggcagtggtgagagacaatgaagctcatcttagaggcacaaacgtcatttttgaactgacacaagtgcatctggtgtttgacacgtgttggttttggtggcctctgtgatttagaggaaggaaagggccataagttctctcctcctcaacctcaccaccaggtggtttgttgaaacaaaagcagatcccaaaccgaattctgtcacacatcaaacactgacattaggcagaatgcaccaaagtagccataaaacctgttcctgtaagctggggcaagtcctagctctccatccttaaggcatgttgacaagtacttgcaggagagatttactcagggacagcaatctgcaaaaagatcagctccaggggaccaagaagcctttttggcaggccgtaaatgttctattttttgatccagctgatgattatatgagtatttgcaagtgtaacattctgtatgtgcacttaagatttgtgcactttagtatacctgttatttctcagtacaaaataaggtggaaataaatgtttgcccttaaattattcacagtctgtgagcagggaaattatcatatattgttgaaacccataaaccctttgaattagaggttttccatggaagggtctccgggtggagtgaaagcactcaggggtctttcatatgcaccatcctgccgaggcctcctctctggtgaccccagcccatccctgtggtgtcccctagagtggacacagtagttgcctccatccaagtgaccatcttggcacctgggataccttagtcttgggctacagctgccttctttctttattcttccctgttttaagtagtcatgcgtcgcttaagataggaagcactgtgagaaatgtgacatcaggcaatttcatcgttgttgtgggaacatcatagagtatacttagcaaacctgaatagcagagcctgctacacacccggtctatgtggtacagcctactgctcccaggctacaaacctgtacagcatgatactgtcctgaatactgcaggcagcagtaacacaatgtaaggacttgtgtaactaaacacagagaaagtacagtgaaaatacagaattatagtcttatgggaccaccagcgtatacatgggctgtcactgactgaaaccccatgatgtggcatgcgactatatatccttctcttgaaatttgacttcctttactttttaggctgcttttggtggctttaaccaaattcctgatgaggctaggcaggaaggttctaggggatgaaatagatatatttccccgggcaacaatcccaaaactccaccttgtggctgggcatgggaggggctgcgggtcccctctctttctttcccagaaggggaaaggagacaggggtaggggtcaccagggggtcatgctggcagagcccttggctctaagtgccaactttgatagctattggatttggcctactaagtcctggctgttgcctcccaactgaaattctgcaggacaaagagataaagatgaccctgtatcagctgcctctaggacagggttgtggtgtttctgttttggtggttttagaattcctgtaactttcatttattgcccacgtttctctccctttacattgcacacacacccctctcatcccagactcttgtagactctcgtttaacagaacctcagccttaaagaaaaaacaaaagcaaagcttgtacacacacacacaaacactccgctggtattcctaatccactgtggaatctgttgccatagcagtggatgccccctccccgccccaagcacagacacacatttcatcatttggggctcccaccaggtttttgatttttttttttctttctcaaacagcaacagccaacactgcttttccacaaactattaatatatctttacagtactctcttgctactttttagattgcatttgcttctaacttcaggtacacctagtcatgcccccatcagtaaggctaattttatgaagaggctggtgctggtttgcttttagtcttacttattattggatccaatactaaatgaataaagagatttggggagttacctaagagtaacatgggaattgagctctatggctctgggcaccttaatttcattttctgagattttgtatttcttttcattgttttgattctagcttattgctttaatgtactcttttttatttttgaagaactaagtgttaatgaaggtgtaggaaagagtatatgataattagccaggtttgatatcatagttaactagctggttcctagacaaatatatgatactcttctttttataattagactatgtgaacattaataatggaatgggttggagatatatatatatatgtatgtatattttgatgttgttaacctgcttaggaaagctgtagaatttacttgaacttagtgtgttaaataaagtcctggttttctgaagccaaaaccaaacatgttagttactcttaacccagggctgtgggagaagccagtgattctaggcccacatttcctctttgaaaactagaaacccctccatcagggcaagactcccaaagagctgcagcctccacccccccgtcccccccgccccgccgcccggtttcaagcgattctcctgcctcagcctcttgagtagctgggattacaggcacccactaccgtgcctggctaatttttgtatttttagtagagacagagtttcaccatgttggccaggctggtttcgaaatcctgacctcaggtaatcctcccacttcggcctcccaaagcgttaggattacaggcatgagccactgagcccagcctagttccagaatattcttatcacaccaaaaagaaactgtagccattaagcagtcactctactctcccctcagtaaccactaattattggccttctgtctctatggatttgccaactctggatatttcatatggaaacatacaatgtttatttttttgtgtctgggttatttgacttagcctaatgttgtcaaggttcattgatgttatagcatgtatcagtacctcattccctttaatatctgaataatattccattgaatgtatatatgagattttgttcatccattcatcagttgatggacatttgggttctttccacctttgactattgtgaataacattgctatgaacattggtctgcaactttttgtttgagcacctgttttcacttcttttggatctatacctaggattggaattactggatcatatgataattctatgtttaaatttttgagaaatagaacagctaccaaactgttttccaccacggctatgccattttacagttccaccagcaatgtctgagggttccaatttctccatactctttccaacactagttatttcccattaaaaaaattattatagctatcacagtggatgtgaagtagtgtcttactgtgttttaagattttttatagtactgattttgtatgtgtctggactcaaatttttgtattaatgttcttaagcctgctatattgcaaagctacatgaaaaaccacctatacaaaattccctgtaagagaatggtgtaaagcttcttttccttctcggcgcctgctatagctaaacatcgtgagtctgtaatctgtagtatgtttaagccacttgcagacaatttgtggcaaattagagatgatatctgatgcctctgaccttctttctaatttctcttttttaggttttagggtttcctttgggccacccaaaatgttttttaaatactttggataagagctaaaccacctgccactggggacttccatactctcggctcccttgtcatctgatggcattttgattgtctcgaggccaagtgacttgctgtccatgatgagtgatgagaagaaccttggtgtgtcccaaaaattggtatcaccttcaaggagcacaagtagctgctcttccaagcaaggaagtcgacaggtaaagtttaactcatgcaaattttaatatgcaaatgtaagccatcaagtttgctggttaaaatgcacacatttacttgggaaagcctacttctcagtttaagagcatttacttttggttatctcttgactgtatgaggagagtaaattctgtataattttaataatgtgtgcctaccaggtgggaagaactgcatttggttcttcgtataattttatttaattcttgcaactgtcccccaatgtagattttaacatcttcattttccccatgaggaagctgactcagactgaccaggttacttgcccaaggacacacagctaataaggagcaaagaaagaagcaaagctcagtctgtttggcttcagagcccacactttcctttatatcctgctaagcaaaacaaaaaaacaatcaatcatttttctggtaattataatatccaccccaactttcttcccttcatcaaaccttttatggcagcttgtaaccacagattgccctgttagtagcttcgagactcacctgctttatatctataatggatgaggtaacctaatctacagaaaaatggtccaaagaaattaagtaggaggaagaaagaactgaaacaaaggaatgaataattaactcctaaataactgttgagtaattatatattgtttcttggtttcctttctaataaatctttgttggcagaatttgctggttttagatcagtggcagtaaatgcacattaatcattataattcttcccccagcagttagatggagagagaatgagctgtcagaaagctgaatttatgaccaaagtggtctctgagccttttcagcacctgctgcttctgttggcatttccttttcctcatgggaagtgctggcctgagaaatcacccagagtctttggttccagaattggaagcagcaattaagcaactcccacctcagtcacgtctacacgtttatgacacatcatcaggggtctgtccaactgagcgttgcctgggataaggagctttgccacccatgaatctgtgattccaggaaattagattttgccacagacctgacatttgggaagccctccaggatctcccctgaggggttaaggagaattttgtcagcactgtcatcggttccttctggaattaaaaaaaaaaaaaataagaaaagactaaaattagtcattggctaatgcatcatggctccctgcagttctgttttcatgagggtcactgtgcttgtcctctttgtcagctttccacaggagtatttttctccctaagccaaaactctggttgggattaaaacagtatgtggtatatcccctacctgcgccatcttccttacacctaggggttgttatgtccttctttgataaagggggagaacatgattcatttaagtagcaggtggtgattacaccataggaattggaacagtacaatgaaattctcagatcaaatactacagaaacttttttcagtgtgttatttggaattgatttggttttcacaaagcttttttggaagttacatcatgaagggtaagaggaatgtgcttgatgcctcaacttttttctgacttggaatgcttggtcaatcagtcactcattcatcaaatggtcatcttttatatttagggtctcctgctttaatatgcatacactgtgactttataaatggagacacttatatttcctctgtggcagagaaggtggagaatttattaagtttattttaacttcagcctgaagttagttataaagcccatgtttgatttccagaggtcattttcttggtccgtctgctttctcatccttctgtcgaagaaaggtgttctgtcccagggtatgcttagtgtttccatccacggggtccaccttggcccccatacccaatctgccttcacaaactggcccaagattgtgcttcagtctttaaaggtgctgcagaggtgcaggaacctttgaagctttcctcacttagggcacagccatttccgatggtctgtcggttgctaaatacaaggatgacactgtgtttccagtcacgtcactgaagagtaccagttaaacacttaaaacttcaagatttacatagtaagaaatttaattagaggaatatgaaaatataactaaagataatctgtacaaataccaacttgtatttcaaacaccagtttaaagtcattttcaaattgctttctttctttcatctggaggggatacatctgatattgattttattggtcatttttcttagtgctagtttttctcatgtgctttggaattgcagcttagagcttcatctagagattgttttccatgtattctttctctgcgctcaccctgacccatctagggatttgctgttgccaacttcctacctcccaggaccccagtgcagagtcaagtctaatatttgcagcaagggccttctgttccatgatgatgatggacccagcaccaggccccagacagcatagcccagcgcctggctgtgaggctgtgtctcccttctcacctctccctgggcaagcagatctttaaagctctctttcattgtggtgtgggggcttccccctccacagtttcagatttccagtagtgagcctggctcaggtcccagccttttcctgatgacatttttctcctcattagccctcagaaacaggctaatggacacctttgtctacagtatacttcacatttctatttggttctgatccatggagatacttaatcttttttttgccacattattctttttttttcaggtttgttgagctaataaatgacaaatgaaagttgtatatatttatggtgtataatgtgatgtgttgatacatgtacactttaggaagtgattacccattatcaagctaatatacccatcaccccccatagttatttgtgtgtgtgtgtgtggtaagaacatttaagatctacttttatagccaatttcaagtgaataatgcagtattatgaactacagtcagcatggtgttacattagatccccagaacttatcagaccctgctaactaccattccatcctctgtttctgtaagtttgacttttttagattccacatgtaagtgaaatcatgcagcatttttctttctgtgcttggtttatttcacttaacataatgtcctccagttcatccatgtgattgcaaatgacaagatgtctttcttttttaaggctgaatagtagtccactgcataagtatatgcaccacattttctttggaaatatttaatcttgtttctttatcacacagacacaaaggagccctacatgtttataactttgtatatttttgccatatttggagtgagggtggcattttgtatatttttgccatatttggagtgagagtggcaatagggaaggggcattaaatgcatgaacttaaaacaccatcttagctggaagacatggttttttaaagtcatttttacttaaattctcatccagtattgccaggtgaccttgagagtatctgtacttcagccacactagttttctttcactttctggagctgaattttctcttgtccttgtttcttgaactgaacttaaacttgaacctggtcttcctatctcagacctattcatataaaatctcaaggagctatgtgtttatgtagagatactgtcctacctatatacctatgttaaaagagcttgcttccttgaaggagaaaatgattgagacctaggtgttttcatttttacatctgacctaagacaaaatgtacaacttagggccatgaaaaccctaggaggagggttctatcatcttttaacttaaatactggggctcctgagattttaaaaacaataagcctcactttgccagtatgaaaacaacctgtcaataaaatctcttcaagataatttgaggagaaaggtatgcatagtgattagaacattaactctccaatcttgggtccacccattaattggttctgtgaccttaaactctccaaacctcagttttttcatcaataaaattggaataataatagttcttttctcatagcattgtggtaaggatgaaaaataagcacttattccagggtcagactcaggataggtgctgagtaaatataaatgtatgtttttatcattataattaacattaatttgaccttcaagtcttatttgtgaaagtcctgaatgcccatagtgaatagttctagctttttttctcccaggaacttttacagtatcatacgtgtatccactcatacctttttagtgttgtacaaaagcccactaaaatatacactgtatatgtgaatatatacttttaaaataaaaaatgccttactctacacattaataaaatgcttttgtgacgaatacaatagaatgtttaataattgggctacatttgacatctttaggcataacctatacctaaaacaagtgaaaaaagttgatgaattcttaccccatcctgctaagccttgcccttgcttgggtggtaaatgattttcccctctcgccctctatgccagcatctatctcttggtagtagctgcacagagcattgtgttaagaaggactttgcagctgagtctgcattcaggggaaagattgccgtgtttttagctgtgacttctgggcataaggcagggagagcacagcatggacattgtgtttgtcaccccttagtgatagagaagagttaaaatcaagagctctctgttgcaatctttatattgtgttattggatgaacttcaggcaagtgtaggttgtctcagttctccattcataaaatggaggaaaactcaactcctgctttttcctgtggaatgcggtaagagaaaattgagtgttttcagtggctaaaagacattgacagtctttggagaaaagtcctctgtaaatttaagaaactggtataattacggatgagctgcttttactttggccagttctggaagcagaactcacatgaccttgtttcaaaaaccgtgacactctacagaattggttctttttgaagtagatcacttttcagatatcgtgtcttcaccatagaggaatctacttttcttgtaggaactaaagggaccctgcttataagaaaaaaataggttgttggtccctcctgactgtcttaatcataccctattattctagagttctaagtggatcttcagtgttcttcctcatcccaggttttggctccactattcctttagctagaatgatctatgaaaccctgctgcccttttgaattatgtcatttccttagcaagaatttttatttattgcttaagcatttaaagtgatttttataaaaacaagattgctcattgtaaatcatttacatagtaaatgtgaattgctattctttaattaacttgtgtttaaatagctgctgataggtcaaataaaatgcctgaaaatgaccgtggtttgtgcaggtcattggtgtcattgtcaaatggtttccttgcagtcctggggatgaaaggctgattagagttgattcatgagagacaaggaacagaggaatggaacagcccagttctgccaggccccacgacaggatttgagagaagccttcacaaatgttctggtttggaaccttgagcttggctaataccatgcttaacactgccatcgtctttcctctttcaattgcttcattggttaaaaaagtatatggttgtttaagtactgggtcctgtttatacatccttttatttctcatagcacctaggacagggctttgcatgtagaagatacaaatcgtcggactgaatttattgaaaaccagcgacaaatatccttctattggggcaggtgagaatgtatggccaggtatacatggagaacatgcgggagcaaaaagcccacagattcttaagctcttccactccaatgacagttgtgaggatctgtaataaaatgaagaagggcttccccattgattttattctggcaaatgatggcatccataaatgttcttctatacctgtggtctgtgaaggaactactctattgaacgtctggaacaaaagtaaagacgcagctctagaaactgatgcttgttctcaccggttttgctttttgcctgctggataaccttgccatgttttttttaacacattctgggtctaagctttttagctgcgaaatttggataattttgcttacttttgagaactaaatgaaacagtaaataagaagcatctagactagcataggggaaacattcagtaagtgtagattaaattaatgaatgaataaacatgcagttgcttagtagaaagattaccattcacaaagtcttgtagatacattaagtgggttaaggaatatctaagtgggagggagaattgctattttaaaatgtgtaaaatatgagtaattgcaatttcctcttgtctttttcccactgcccccttacatttccttcctagaattttcaaagtaacacattccagaggccagattagcttgataaagatgaccaagtatgctttgtctttatcaaaagagtcctatagccttgagttttatttcttcagccaatatgtattgagagcctgttattaaaaggccctgagcagggatatacgaagctatgaaggacaggacagctgaacagttcatcataaataagaaatcaactctgattggaaagagtatgagtggtaaagagagcacagcctctattcagttttaaagtgtattgttagcatttggcatagaagttagcaatagagagtaaatcctgtcaaaataattgacaagtgcttcactcatgattgcaggggttttgaaatggagagatctattgctaggtaagtttccatacaattatgcaattcactcttgtcaccctgctgtttctgggctgaactacagtggcttgaactctcccagggtcacctgatgagagcttatttatgcagggtattagattatgccgcactccagagagcccagcctggctgggctcagggccggaactcataaaacaggtgagtggaatggggaagaatttgccaaggagggaaaagtgaattaacactttaataatgtccaggtgtttatcatttcagctgtctgggtattgaaaatggttagtcccatttctttctttttttttttttttgtttttgagacagagtctcactctgttgcccaggctgaagtgcagtgctgcaatcttggctcactgcaacctctgcctcctgggttcaagcgattctcctgcctcagcctcctgagtagctgggactacaggtgtgcacctgtagtaccaccatgccctcaggtgatccacccccttcggcctaccaaagtgctgggattacaagtgtgagccatcacacctggccccatttatttctttcaatttcataatgtctttagagatactaagatttagcatctctaaatttatttcagtattcagtataggctgaataaacaccacaagaaagtccagtcaaggaggagggaccttggaaacatcgtggttgtctcacactgttctatgatgatcatagaagaggagaggcagcgagcatgaactctggagccagatggccagtgtttgaatctccggctgtttataagttgtttgatcttggacaaagttaataccctctctctgccttgttttcttattaggtgtaggttgcttagtttgaagagcgcctgtagtaggaagtgctatgtaagtgtttgacaaataaacattcgccttttgtgagcagaggagtcccgggagcccttaagcaatgtcacagctgcttccctgcttcatcttttcagctgggaggtgggtggcacagtgcaggggcaggcagcttggcttgtgtctaggctgctctcaggaagactcagcatgggacactcgaagtgaaaactctccgatagcatcttcacagctcataatatcctttcatgctaccctttggagtctcagcacaactcagtggggtctgtaatgtttcccccactgtggaaaggaaatacagcccaaagatattaactgatttgtttggagtcccatggctaataaatggtaggtgacccggcaaccaactgtttggagagcactgggtttctttagatgctagaagacttcttcagaagttaattcaagttccatgccttatgtacaaatggttgttatttaaacaagcctccctcagctcacatctttatgaatgcagggccaagaagaacgtggatgattgaagtagccttaggatccctgtttgcctggagctgtttttttttgttgttgctgttgttgtttgtttgtttgttttctagtggaccccactgagaaaaataattaactatatagttcttatagttttctagattctcattttctgggccttttacttctcctccttactgctgaccttttagccacccctatggttataacatacctcagaggcaggaaggctgaagaaataagactgagctctcaatatatttccactctgagtaagtcttataagacacaaacaaacatttgatatcagaagaggttaaagtatcagctcaaatgacatatttgagttgtcaggacttctttgttcctctccacatccacaaatgacagactgtcagctgcattccacactctgaagatcacgagaaactgaaatcttaaaacacttccagaaagttgctgaactgtctgtattgttctgcaatcctggaataataatcacagcaaatatatttgggtgagatttagaaatattactttgatgaaaactgcatgggatgccttaagaaaataaatatatttattcatggttggcagtgggcacatttaagatacaggaaggcagaaccctggcccagatgctctggttgagagcacagcatagcagctgtacaaggtaatggaatgttctcaagaagctattgatgcaaatgtgaactgagctgaccgattcaatagctctttcctggggaggggaaagtctgcttcagtaatttgataatattaaaatactaaaggtccagaagtgacagtgcaagaagtaggacagaggcacaacagaagacttccctagtgtcatctgatatccctctaaaacctacaccctggccctaccgtcaagttcagctgtgttttccactgcatctgttcacaagcccacatcaccctaaatcacctcctctctgttcctacttcagatgaatcacattcctggcacatcttggccccgtggtccctggggccctgtgtagtgagctgaatcataaaaagacatgttcacttcctacttaattaaactaaaaagtttctgcacagcaaaaggaaaacagtgaacagactacctgcaaaatgggagaaaatatttgcaaactatgcttccaacagggaactaatatccagaatatacaaggaactcaaacagctcaaccacaacaacaaaaaacaaataatctcattaaaaaacaagcaaaggacatgaataaacatttttcaaaagaagacatacaagtggccaacaagtatatgaaaaaatgttcaacataatcatcagggaaatgcaaatcaaaaccacaatgagatatcatcttatataagtcaaatgactattaatacaaagacaacaacatgttggtgaggatgcagaagaaagggaactctttcacactgtcaatgggaatgtaaattagtacagcctcatcagaaaacagtctggagatttcccaaagaactaaagaactaccatgtgatctactgggtatcttgccaaaggaaaagaaataaatatatctaaaaggtacctgcactcatatgtttattgcatcagtatttacaatatcagagatataaaattaacctgtttccaccaatgattgcatggatgacgaaaatatatacacacatggaatactgttgagccatcaaaaagagtgaaatcatgtattttgcagcaacatggatggaactggaccaggtcattatcttaagtgaaataagccaggcacagaaagacaaatatcacatgttctcataagtgagtgctaaaaaatgtattcaggtggacatagagagtggaatgatctagataatggagactcagcaggtgagggtgggggagggaggagggggagaaattaggtaatggacacaatgtacgtggtgatggataccctgaaagccctgacttgaccactatgcaaactgtgtatgtaagaaaattgcacaggtaccctataaatatatacactgttttaaaagaaaaagatgtatccacatcctaatgctggaagctgtgaatgttaccacatttggaaaaaggacctttacagatgtaattaatttaaggatttgagatgagtagggcagctcagattatccaggtgggccctaaattcactgacaaatgtccttataagaaacacgttcgggagaagacagacatagaggaaaaggtgatgtgatggtggagagagagattggagtgatgcagctacaagccaagccatgccatggaatgctggcagccaccagagggagaagcaaggaatgaatccccctgagatcctccagagggagcgtggacctgccaacactttgattttggacctctggcctccagaacggctagagaataaatatctgtttatttaagccaccaaagtttgtgactgctcatcaagttggcctcaggaatctaagacaccctgctgcttactgtgtgtcattttttctgggagtcccagctcatgtggatctaggctttggagattatgcctgtctgaactcctgcagcaggtttgtgtgaatctcccatttgacaatttacaaattttcaaccttgtggtatcccttttattaacatttgtaatgtatgttagctttttgagatccagcacttgattttacatctttgtatctctagttcctgataatgagctttggacctttaagcagggacccccctattaaaaagaagctccgttacaaactggactataacatacttggcactaaagtcattccttctttgatttgtaaagttctctgagatcttaacattgtcactaggttctcattatgagaaccagttattgtgtagcactgtgaaaataattcacttctgatttggatcaagataaagaagagtttattgtgctaaacttctgccacctactcctgtgattctaagtcatgcatgtgttgattagtcagaatgtatctctgctttgattgcaaatttcaattagctctgaaaaaatagttttgagcactctgtaagagagagcactgttctcagctggtgctgtccagcaaagcagtgggtctccttgaagagtcatgaatgccctgtagttggcatacaagagtattatatctgagtgcagagtctgtgattctcttctgtgctcagacaccaaagggcagggctctgtgacatgtcactgaaaggttttttttaaattaaaatataataaaggtaaaatattaaaacagtcctgggtgatataaaaaggaaaaatatctcacctcaggccccagtcccattcacacaggagcctgttttggagtttttctccccttcatacaaggtgtgtgctcatgagttggagtcaaaagacctgggtcctggtccttaaaagcccctcactcatttttcgcagccccaaacaaatcactcagcatagattcctcatctctaaatgaaagagctgggtaaatgacttcttcattctgtgtcacactctgagacttaaatattccatgatggtacaggaaagccaatcattatggtgtactttgaaggcaagagaaaaactcagaagagacccttgagtcacttgggtggacagagctatcttgtctttattgactaagccacaagtgtatggagggcagaaacatgcccctggaacaaaagacagacttgttccgctgggggagagagtaggggggtgagaggcaggactggtaggggagggtcagtaggtggccctggatgggctcagctgagtgctagtttgcttctaggtgatcttatccacagtggacactcagctgcgaggttctgcgtgggatctcaagacgcagtctgcaaatgggttctgcctcttaatagtttgtgatcttgcacaaactaatttggagcttcaattttctcatctgtaaaatgaggataataatgctttcattatagaatcaccacaaggtacatatattaaaaaaatagtagttgtcacttttataactataatcactaccacaatagcaactataaaaaccccatcaccaccccagtgggctgcatggccagagaggaatgacatttatgggctggatgttttcatctttaatagtctaagagaccctgcttaccgaacagagcattaggaggagagaaaaatgcatagaagatgctgtttgtagctttaaggggcttgatacaattaggggaatatttaacaaatattaatggcttcccaatatatctgaggggcctaaaaacatgccaaagtaattgtagccataaatgctgagtgagtgatcaacagcgtggaaatagtcatatgtacattgaagtgtttttattaatgctattttaattataaatccgtctgtggtcaatacagttggaaagcgtttttctctttggaaactcaggatgggaatgacctcaggtggagccactgacagagctggcagcccacaggattttatctccttgttgtcagtatcagctgctggcaaggactgattttccttccctttctcaagggttcaccacaaagacagcatgaatattctcccattatctaagtaatgaaggcaccagtgtttttggtctgtggctaaccaagtagtaagacttgaaacattctggggcctgaattatctggatattcacttccctagctctggcctgaggttggagagctacatctgtgtgtgaagggaaagaagggatggtgacggtggcgggtgatgactgctactcccatttagtcatcagaacccaagtgggagcttcattgctcagtctcctgttttctttaatcttctcacttagatcccaaagtcagggattgtacttgaggttatagagctaatgcaaatgctgctgtttagtatgacatgagtttatgatagaagatttagaaaggatctcatagctcacttgttctaaactccctgccagtcttggaatcttctctgtggtgcctctgccaggtgaccaccagcctctgatggagcactccagagactttcatagatcagccatgtttttgccatttttcatagcactcattagatagtaagacaacccatcctttaggcaaagctggaatccagggccttgtagttcccacccgttagtcctggttttgccttcagattctgtcaagtcaaatcccaattttttgagacagcctggtctcctggaatgtggctactcaagttgggcttatggtccagcagcagtgatagcctcatctgtgcaggtgcagaatctcaggcctcccccagacctactgaacttaaatctgcatttttaacaagatctccaagtgattgacatgcaaattacagtttgagaagcactgagtgagagctcatacactacctttctcccaactaattttttcttttcttaaaaattgccattgctatcaggcctgctggtgctaaacaaacaaacaaaaaaccatagctgagaaacatttaacaagaaacaacaactccagttctcagtgattgaaatgtgagtacagttttggtctagcatcagttaaagctgtcattctattaattgaaaatctattgacaagtattgtcagtgttcatagaacaatcataaaaggtaatattgatgatcgttagcctttcttaataggccgtggaagatcttgaatgcctttaaaatcattaaagacacattaaattacatgatttaaggctgggtattgccttgtgatttttaaaaaactgataaacggattaagtgagtaatcaggacacccgttttccaaccatgcctgatagaggcaaccacaaaactttcttccccaacactcttgagctgcaagaagaataaaagttttaatcgttttctatttctgacatcactgcaagggtagtgactgaggattcagcatttgaaaggtgcctgtggaaacagctgtgctggagggaagtgctttcaattcgtgcactcagcaatatggaaattaacttggccagcgcatgagcatgaataaatgcttagctgcctttgcaatcacaaagcagctttctatctttggcacttttcagacattcagtaaaacagactaaatttaatgccagatgacagcaccagactgtcttcagtgaaactcatgcaaaaaccttaagaagccacatcccccaacccctcccatgtttctctctccacctggtattcatggtgacctttaagcttgacaccccacaggatgagacatcagtgcagccgtgttgggctaagtcagcagggccttgatttccccaagggcccaagtctaccctgtactgtgtctcaggatatgcagctcaaggtgcctgccctactcttggggtcaccaggagatactcctaagtcctggttcctttagccaagagaaaccaacatccctcttgttttctgtcctgagtgccaactcactctaatccagcacacattattaaagtcccatgtcccgaaggttctgggggactcttttgataccccccttgctttgcagactcattcagtaaacatttatttcggcccctatttcccaggtagtaggattgtaataaataagacacagtccctgtcctcacggaacccatgttctagctagggaggctgacagtgcaaggtgactgtcatccagggaggaggtttgggcctaaatgagaatttacctggctaagaggtagatggggcaggctttccaaatatgaaaaaaaatgaatggcgaagacttggcagccttaaaatgcacaggctaatttcccttccctgtttggtgggattacagtatagggaaaacagtagctatctctgagcagggttgaagaccttacttgcctccatccatactgcactgtttcttaactccttccaattgtctcaaggtcttggcccaccactattcctctacccaatgggatttactcctttttcttcatcagaatttacatacttaaactacagtaaaaatgcagtatgctataatatgtgacagaatgattaaaaatgtaagttctgcagtcaggtggcttcgtcacttggttttgtaacatcagggaagttatctaattctctcttcctcagtttccacatgcaaaaaaataaagaatactaataaatccaatctcaaaggttgtgcaggaattaaacatgatcatgtaagtatggtatttagcacattatctgacatatagaagatgcttaagtgttagctattgtagttgctctattctttcaacatatttattaatatctactatgcactattttaagtagtgaacaagacagaaaaggttcctgctttcatagagctagaaagtgttctccaattattttatattattattgcttatatagttaggtttatgtattatttcagccgaccccactggatagtatttcctgaggcactattcttttgtgttttaaatggcatgctgtacagaattgtggatacagcttaatatctctttgtaggccagctactcagtgccatttacttggtttgagaacttattttcttggtttgagaccccaacaatgaataaaccaggagaaatctcttagttcctactaaatatatacttagtactttactaggattctaagcaagttgaaaagatggtcactgtgatagcttgggaaaaaaagaccaaagcactggagataaaaatgaaagggaagaaaaaaaaaaaccttagaagttaattaattgctaaattatttggtaatggacagtaataataatgtaatttacaggaatatgtgactgatgtggtttggataatttagaaatttcatggaaggaggtagaaaccaaactaaaatcctgaagagttcacatcgttggaaaagatcaagagaagattctgggaggccaaaatataagtaaatcgccaaagtggaaataaagacaaccattttgtcatcctcatttttatattgcatgaaggacaggacacaatgaggccccataaatggttgttgacttaagcacaagtgaggaattaatggaatggatgagagccgaggttaggatggtggctgggcaataaagaggaagggaagtagaaaatacacattttgaagatggaaccaacaggacttacttacaagaaaatattaaagcctttacaattttcaaagtgatttcacatacactgtgtcctgggctagtattctttcttacaacagcacacagaatttgtaccaagttcattagtggttcttaccctgtcgtccacgtaaccaatgtcctcttattatgaccagtgttttagtgattgctttactctcctccaaaatttactctcctataaatttgtatatatataaaatttatatatgtaaatatgtattatgtatatgattatatattaaaaattacatatataatttttttaagagactgggtctcactctttcacccaggctggagagtgtagtggtgtgctcatagcactctgtagccttacactcctgggctcaagtgttcctcctgcttcagcctcccaaaatcctgggattataggcatgagccactatgtccaaatgatattcattattaatgtaacctacttgaatacataattttgaaaatgtcagcatcatgctttactgtaatataaaggaaaattcaaagaatgtggttaatgttaaaacatatatttcaatatgtaaaagtccaggcatgactacaccagaagacataatgaagtgatcagatatacctatacatagaaagtgacaactgcaaatggagaggatacaggtgtgctatattaataactcaaatagcatggccttcagcaatatcgttctctaaaatagtaggagacacttggtaaagttccaaaaagaacaaaatacagtcttccctcagttactctgcacttacatcccaagagtgtataaaaaccatgcgaaaatactttgatatatgtgtgaaacagagtttggttccatgctcaagtgattttaagcacatttcacttacagaaatggctaatggcactttgggaagtctttggggtgtgggacggcgttttcattgtgcaagaccgaggcattgtgggacatctaacattcctggctcccagccattccatgccagaggcatctccctatcattgtcacaaccaaaagtggctccaggattccacagtgtccccgagggagcatttgcaacctcactgagaaacactaggctggatgttggcctcacaactcatggacggtgacagggaagttggcgatgaggcagggggcagatttggatgtccagtccagaaaaggagttggttgcactgcttttttagtcaaggagagtcttcactttcttaaatatttcaaacctggcttttccaacctggtaacagtttcaagttctgaccccaggtggaagataaaatgaagaaaacacaatattttgtaggaaaaaaaaatgcaactcctttttttgtttatttatgttaagggccaacagatgtgctttaattccctgcccttcttggtgggtcactgataggaatgcactctgtctcaggaggaggaacagtccagttctaacaggaatttttgaaatagttctgagatttaattcttgttttcctttaaacttacaggtatgatcttatctactttttcttcagttttgtaaaggatgcaataacgtctgattcctcttggtatttgcattgtgcacaatcgaatgttttgagcagatgtgtatgattatttagtattagtgctctgcaggttgcttctgcctgggagtcttaaaacaaacaaatcaaaagggcttgatccacttagagtactttccagaggattttaagtcttggatttttatttaacaatgacgatacccacaccctcttctttcacaattgtgggtgcattgtatctaatttgtaaatagtcatttggctcaaagatactgggcacatttcaaatgcacgctaatttatgacattccaagaagataaatctgtttgcagacttattccaagactaagtttattcatttgccaatcagatgcatactattcacagcacagcaggttaggcattgtggggaaatcagaaatactccggaccctttatgccctcaaggagcctgctgtccagcagggatgataaaaccgcatgtacatgttatcataagtaagtggtgaacctccagaaaagtaagatggagtacctatggagtctctaaggatgaaatggtattttccactggaggaggtgaaatttgaggtggaatttttaacttgacaaccttaaaggttcattaacatttagatgggtaaaatgtgttaaattttgtggaatggctttctgagctaaaataaattcaagtaagtttttttttttggtgtttttaagtaataggaaatctgacttcccatcacttagtagtatgcatttattgtctgagtgtaattaagtgacttggaataattggtaataattttgttatgaagaaatctcattcaacattgctaccttccttaaaaaaaaaatcctctaatttaaaagctggatcttttttcgaagctttgcttttttccattgaagaagtctttttcacaactccagatcttgggataccactgtgatattttaaaactctggaatgtacctttaattggattcatggtaaagtgccatcagatagaaggcagacccatcacgatcattatgtaaagaattcagttgctaacgtaggaaagggttctcattaccaggtgggtcccacgtattgaacttgaggacaacacagaaactgagccagagccactcaggaccctgtgtggtttctgtgccctccctgttagaccacttgtgtcccaggacttgaatctaactgcctcctgctccctggtgctggttcagactcactgtccatctcccagtgcccttggcttctgcctgtaccacctgcctgtgggctggagatttgactcaaagcaagttagtccaggtgaaatcttggctgaagtgtcatgcttgtcaaaacttactctgtgttggaaatgttttctgtcgggtttggctggcagttactgagtatatgtataaatgtaaaaatttatcatttttatcaaggcatactcttaagattcatgcatttcatgtatattgtaccccaataaaaatgtaaaaataataataaaaataaattctcccagtcactgaagtattgctacttttggtttatcttggggtgattagcaatgatgtatttatttttaagtatttaaaagtaaattttcagaacttttagtgttcttctatttcttttaaaattctttttcaattagttgaaataacctaaatagccaatagtggaagattagttgtaacaactatttgtaataattggccaaagaaagaaaagtttttgaaacaaagatggaaaaaacaaatttctgggaaaaaagtgaaaattcttgttgcaaaaatatacttttgatgcttccagatttccagtacatttaaatacctagaatttgtggatgctgattttcaacaaaataattatttcaatcaagttgtcatatttactgatttgcattgtctcatactgttcagccaattcttaaaccaacttccttcccccaacaccacacacacacacacacacacacacacacacacacacactctctttcggttaaaattcagactgaagtctagtgctgaacgaacagtaattgcatggtaatgtcaaactgaacaaaaatagaacttacaggaaaatctttacatttagctgtgcctattaaggttcaaacaccgaaagaaacattcccttctaaaaaaaaaagagctttaaaaaaaccaaaatttgatgccactaaattatagaattaaatctgtgaagcccagggactgtatggaaattaaatttggatttcttctccccaacaaacccagccagcctccccatcttgaataaatttactgacaggatgcagtgctttttaccattattatttttcaaaaagatagacatttaacatgaactcttttgttggaacaggacagctgggaagtggtggaaggactgaggggggagatgaattacacccaggagccaccagttcagaaaggatttttgctgaaaaagaggaagtggcccttaaaaggctggcataaggtaaggttggtcttggcctcccctttatttgcactcacactgccccactcagcacctggttcttaggtactcatatttaatttctagttggaatttgagaccaagaaaagggcacctaaattgaatgccttaattaataatactttcttccccacagagattcttctatctggacaaaggaatcttgaaatatgccaagagccaaaccgatgtaagtctttttgtgggcccactgtggtattgaagaatcctaaaggggtaaccatcagctcagagatgagagtgtgtatagttgaggatagcttttctcggaactggaaaccatagaggggaaacacttctgtctgagctctgggttccaggcaggctcagttcttccaccaggtcaaggtgcaggggctcccgcaacactctctgggcatgcaaaagtctgttctggtcttaaggttgtgctaaggagttcctggggtgggagaatacatccttgcagctagataacaggaacaaaacatagggcatccctccctcttgcactgtgaccgagagattccggggagaagcccctgggtgaagaagttccttttcaaattaatcccaggcagttggtgtgtgaaggctctgtgtgtgaatgaccatttgtcctgtcccttgtaggagtcctactcttctcccttcttcctctcctgtcctctctcagccttctgctctcacttcttttattaatacatcacttctaaatgaatttagacaccagaaactcattcagtgggaggtggtacagttgacaggtgaattcactgccatgggagtcaacccacggtgcttactcttttgtttcctcacatcctggctgtgtaaactgcttgttacttaacccctttgtactccagtttcttcatctgtaaaatggggagagtacttcctacctcggagattcaggaagacagtgcatgtccagcacgtaactcagcactggctcacgctaagtgcttgatgagtcgcagtgtttgtgattttactatcaggggatgtggaagggtgtgtcagggatgtgactactgcttctaacaccatggtccccaagtgaccctcttggtgcctctgcagatagagagagagaagctgcatggctgcattgatgtcgggctctcagtgatgtctgtaaagaagtcatcaaaatgcatagaccttgacaccgaggagcacatctaccatctgaaggtgaggctgcttcccactgtgcagagttcacttatgttggggaagtatcatcagttattatactattggtaatgccttttgggtattcggccaacatgtagaagaccttcattaccaaagtgtttctcatgtacagtgttggtatttgaatgggacgtcattgtgcaggactgtcaacactgcttgagggtttagcctgctggtcgcctcatcccctagatacgaacctgcccccagtgactgtgacaacagtcaacaatgaaaaattttgtttccaaaccatctccacccaggcagtaacatctttagtgaagaaccatttaccataggttaaaacgtgttcctgaaatatatatgtaacatttaggccatggagccctgttttatcactttggctaattttataggaatcccactaaaattctcatattgtagtgaaaaatgtcaggaatttttcccctgaagtgtgggttcccaaatagtacttcaaagctgcttaccctcttgtgctgtctctcctacaggtggtagagatagtcaaagcatgaagcgtgagatctagatctggttcaaatcttgatgtggctactcactagccattgaactttggcaagttaatctctgaaagtctcagttttttcacctataacaaaatgaaaattattgtaatacttatcttgtcgggttgcatgtagaaaacttggtatagtgcctggcccagtgtaaactcaggaagtttagttattgtatgtgcttgttggatggtacccaaatgttagaaattaattgagaaagtactaagactgttttcttacttgggcaaattacttgagatattgggaatggggcctgaggattaggaaaatcaaagcatgagatcatgagctccttgtcttaatgtgtccctgtcctctctatggcatgtgtgtggtgattgagccgtgtgggccacatacctgtggtttgttgaatgggcaagacagtcaaatcttcactatttcctagcctaactgtatctctgggtgtagctaattgtgtaaagcagggtttctcagcctctgcaccattgacattgtgagctggatgttttggtgtgggaggccgactttgtacagcaggatattgagcagtgtccctgccccctgccctctctctagatgccagtggcatccttctccagttatgacaacaaaaatgtctccagacattgccaggtgttccctagaggataaaatcacccctggctgcaaatgactggtgtgaagtatgggagggaaaagcctatatcttaagataaaaaagaaatttaagaaagaatactatcgttttttctgtttcattgatcagtctccactagaatagtttaggttatttcttcaggtacttccaatgaatcttagttctgtattttgacatggtcaggaattaataggttcttatttacccactattctggttaacaaaataaaagtaattatgaattcataatttttaaagaattagaatacctgaaaatatattgaatgctaatattgtgataaatgcagtttaatatttctctgtgtgatttgctttaagttctgtttggtttcttgttcattcttttgaacatcggttatgactcttagtgtaggtaagtgtagttatctgagcgttctagttattagactcagtcaggcagtttttaattgtgggctgtttggtcccatttattttatagataagggatcctgagtagcagagagattaagaggctgctcacccacggccctagaactgcttgagagactggaacaggaccctggacagttatttaataaagtgctcttattcttctaccttgtttaactcatagaaaagtgagtccagatgagtgcttgggcactgacttataacggcctctgagaagagatcagaggaaaggataacacaagattcctgtaaaattcctcttaaccacatctgggaaatgaaatacatttcaagaacacaatttaggggagacaaataggtgtgagtctgtttgtattgcttcttcctgtaaatgacacattaaaaagcccctgcaggtgcttccagtcttataggtacttctaataatcaacaccagagccaacctaacagttcctcagtgagtgatattgctggcatttatttgcatatcctagctctcatctctggcattagtaaagattttcacagattgacctgaacttttcatcttggaagttaacctactgtgcatccttttggattatcttaaattacagcttcataaatctcggtgtcctaatatgtgggtatctatcatttatctatcatttttttaccttgaaaatatcaatacaccatcacacacagacacacacacacacacacacacacacacacactttttttttttttcttttttttgagacggagtcttgctccatcacccaggctggagtgcagtggtgtgatctcggcttattgcaacctccccctcccaggttcaagcgattctcctgcctcagactcctaagtagctgagactacaggcgcacaccaccacacccagctaatttttgtatttttagtagagacagggtttcaccatgttggccaggacagtctcgatctcctgacctcatgatccaccctcctcagcctcccgaagtgctggggttacaggcgtgagccactgtgcccagccaaaattgacttttaagaaatatctatggtatataggtgcttgttatagtctttttatatatatcacatatttttataaacatttgaaatatctttaaataaaaactactagttacagtattcttcatggaaattagaaatcgataattgttcatttatggagagatggctaaaggtttgtgagtgtgatagtaataaaagttagaaaaataatactattgctgtatagtgctttatttctgagagtgggagaaatgtttttttaaataactttcacattcattaacatattgtattagttcgttttcacactgctgataaagacatacccgagactgggcaatttacaaaagaaagaggtttaatagacttacagttccacatggctggggaggtctcacagtcatggcagaaggcaaataggagcaagtgacatcatctgtggatggtggcaggcaaagagaaagagtttgtgcagggaaacaccactttataataccaccagatcttgcgagacccacgcaccaccacgagaacaccatgggaatgacttgcccccatgatccagttacctctcactgaccaggtccctcccacaaaatgtgggaattcaggatgagatttgggtgggacatgggacacagccaaaccataccacatatactcctcagcaatgtattctttgttggagagatgaacaagtttaaatattttaggaagaatttactaattcattccagttcagaaaagattaatctgaaaagtctgaattataaaagagtttaaaaagaaaaatggtgctaatattttcagtagggatagagaagctggaattagagaacttggaaatgctttaagagacagataaatgtaaatttcagtttatttgttgcttaatataattggcactgttctgttttcttaaaaatagcataacaggccaggtgtggtggctcacgcctgtaatcccagcactttgggaggccgaggcgggcagatcaccaggtcaggagttcgagaccagcctggccaacatggtgaaaccccgcctctactaaagatacaaaaaattagctgggcatgatggcgcacacctgtaatcccagctactcgggaggttgaggcaagagatcgcttgaacctgggaggtggaggttgcagtgagccaaggttgggccattgcactgcagcctgggcaacaaggcaagactccgtctcaaataaataaataacagttggacttactcatagaaagccaaaatacatactttataaagatcatttttactctgcatttctttctcaaacttgttcccatagaccacatcaatgtaaacagtcaatgagaggctatttctccattccttttcttttctttcttatttatgtatttttttttgagacagtctccctctgccacccaggctggagtgcagtggctcaatctcggttcactgcagcctcaaccttccaggcccaagtgatcctcccacctcagcctcccgagtagctcagatcacaggcgtgtgccaccatgtctggctaatttttttggtattttttgtagagacagggtttcaccaggttgcccagggtggtctcgaactcctgggctcaagtggtcctccctccgtggccttccaaattgctggaattacaggcatcagccactgcgcctggctgttgaaattacgtgccaactgaaaaagaggattttgagagtggcctcaatttgatgagtaattgttccttccagtgaatgattctcttgtttccttttttcaatcgaatatattataggtcaagtcagaagaagtctttgatgagtgggtatcgaaacttcgccaccacagaatgtatcgtcagaatgaaattgccatgtttccacatgaagttaaccactttttctcagggtccaccatcacagactcttcatctggggtgtttgactccatttcaagtaggaaggtaatgagtgttttgccaataatgaatctgagaacggggtggctttgtttcatggagtcctgtcttgggagctgagtccgaagaaggaaaagttttcggggacaagcagggtaggcttgggctggtatttaattagtctgtttgcccactgagtcagaaccaagaccagacaagcatctattagttggggcgggggcggacagtgactgaagaataaggaggaatttagcatctctgaatgaactagctttatcctgactggtttgagtttggtttccttttctggttgtaaactacagtaggtatgcatatagctatgcaggattgcaaaatatttccaaacatttatattattattttgatgttattaatatttgataaaagaagaaaattaggtccaccattcaaggcatgtcgtatcatagcacggtatggccaagccggggtgatagccagaggtcttagtactttgctagaagcttcttcctcattataggcagatggtgtccattagtgactagcccactctgttatcctttgtcttaacatgtccccaatgggctctgtttccatttacaatgtgcttttgtcatccgtggaacagcgtagcagtatatcaaagcagaatttatttcaaactggaagcaatgtatcattttcttgtggtggtgagacacgagttccattatggttacagtcttcagaggacatggaaaaatgctccaaaggtagagtgacttgaaacgtctgctttctgttgtggctattagatgatactggtttgatgtttacacttcaggttcatttgtgtccttcccctttgcttgtccacattcccttccatattttgcttgtaaaggttgcacccatcatcaacaaaagacactctccttgcagatctttgcatcttcacctggctgtacatgcagacaggtttcttcttctgttccttcagtattgatgcctgatactgatgcctgatttccacatgggcctataagtcagtctccaagggcagagtctgacacacatccaagaaagattgagaatcattgtgctagaggtgagggagtgatcagatggagatcttcacgatgtaggtgttctgtaccctgactgcacattagaatcacccagagggcttttaaaatgcagtaatacccattcccagtcctctgtctcaaataatctctttaaattggtctgaggtagggccctgatatcactaattttccaaagttccccaagtgattttgataaggcgcctgccataaggaaactcagcattctcaaccttaattagctaagactgacttagggaactaaaaaccgaaaagatccacagcgggactgggagtgctctgattgaattgtctgggggtgggatttaggcatatataatttaaaagatttctccaactgatttgaaactgtagccatgattgagaaccactattagagaaagataccaggtggcagccttgaaaattgcattatctcttgttgaatacaggtaatatcacccttgggaccatgtaggctttacccctctaataaatatcactcatgaactttaccaagtgacagcttgtcaaagcagtccctgaagccttgtctctggagcagcagcgtccacccgggaacttatcagcaatgcacattgtcaggctcaacccagatgtatggaataaaaaactaggggtggagcccaacgagctgtggtttaacaaggtctccaggtggttctgatgatatcaaagtgtgagagcctctagcctaaggcatttgggcctgtattcttcagcagaaacatccatcagcattcagtgaacagcaaatatggactatcttttgagttagcgactgggatctggttggagagtcctcttatgtcctctcaggtccatgtgcaagaggcttattatggtcctcaggcaggtccatgattgacaaagttttccttagagaccagtacaactttcattttagttttattaatgtgcattgggtcctgacaagtggatggtgtcagcatattactacaggatttaagttggtgatgatgatgatgatgatggttgatttatttagttcttactctgtgccaaacactcttctaagaactgtgcaatatcaactcatttaattctcacaactctcttgtcatgtgatgtataattatccccatctttctgatgaggaagttgaggcatgcagttttgcaattttctcaatagttacagttcattaagtggattcaaactgaagcagcctggttctcaagattcatgcccttaaccactagagtctacagcctttcctgtaaaaaaggaagtaaaatttccaacccttacagatgaaaaaaaaaatcaactacagataaataaggaaaagtagctggcatggggacagcacagtgatccctcttgctagtggagcattgtgagcactgtcctcttttcccccacagacctggcgcactgtcatgcctacctggtagaaatgagccagctcctgcaaagcatggacgtcctgcatcggacatactcggcaccagctatcaacgccatccaggtgagcccgactcctcttctgttgacattctggccctcttctgctttcctttctcctcccagcctttcactaacagtgggatgctgtggtcagttgcttcagccaaagtcaaggggatggaggtggtcactttgctatgcatttatccttgtcggtttggtggactttactgtctgtgctctctttcctgttttgaaacaaagggtggatcttttgaaagtcccaaaaaggaaaaaagatcgcacaggaggtggcggtccagagctattggcaaagatgctaaaggaacactgcaggtaaccattgcttcccctgacagactggtttcttcattggccctgctctgcatgccatgtgccagcagctaccttgactcagctaggagaatagatgagtgaatattctgtagttgttctttccagtgtcctctgtagcgagatgaattgaatcacttagattatctgggtgctaggataagcacataatggatcgtgggcaagggagagaattttttctaagggaaaaagggtgtgaggtcgcagggactgctgccatttctagggcttttggtttccccaccttcactgttgagcctgcctgtgctcttccctgcttgtgtttgtgccttgttttgtggctgcagttgctgtgtgctgtgacctgtgtcttccgctgatgctccatggatttgtcatccctctaagcccacaggcctgattctctgggcacaggacatggtgtagattctccttggcctcttatctccaaactcccaatccctcatccaggattcactgtgtcatgctaggagctttcccaatgcacagctaagccacaggccaagatttgcagcttaactgttgcatattaattgcaacagttttagaatcaacataaatctcaagcttttggttaggtcacctgatacacttgtgtacactctttggttcaaagtagtttatggactgaagataagcactttggaagtaaagaatgttccatgtacaaatgaaggtcatttgttttgtagaagccctaggtgcaaagaaaagcattttaaacctatccattactaaccgcctggatacatggatgattattgccaggaggaaggaattgagtataaatgagaaagcctggcagctttagctgtcattttcaacctatagctttaatgcttctatcatttccaaaagaatatgtgatttctcacccatttttagctcacaagaagcaagtttctgtggaaagtgttgtcttgagttctcattttttaaaataagttatcactcagtagaaagacctacctaggctgggcgcggtggctcacgcctgtaatcccagcactttggaaggctgaggcgggcagaacacaaggtcaggagatcgagaccatcctggctaacacggtgaaaccccgtctctactaaaaatacaaaaaattagccgggcgtggtggcgggcgcctgtagtcccagctacttgggaggctgaggcaggagaatgctgtgaactcgggaggtggagcttgcagtgagcggagattgtgccactgcactccagcctgggtggcagagcgagactccatcccccccaaaaaaaaaaaaaaaagacctacctataaaatgttttgtatttgtattaccatgtttcaatcttagaatcaagtaaatattctaagcaatctgcatctgaaaagaaatatctccctttggtgttacttcaggtcccgaaacctttttctggcccagtaagactacactcctccaatcctaatttgtcaacactagattttggagaagagaaaaattattctgatggctctgaaacctcatcagagttttctaaaatgcaagaagatctgtgtcatattgcccataaaggtaaatgagttttctttcttcctaatgtgtttgatgaaaatgttaagtgcatgtctgaatgtgagatgtccttagagagagtatcttagttggttcattttctgctctattaagatttagggaaacctaatctttattttatttccctagtagtggagaatgtattggcaagaactttctttttaaccttgtgggggagacaatgagagagagttagtactttaaaagctgagcaattcatgtgatgttggtgggagtgtaaattggtaattttctggagggcaatatgatattattttctcactatttttaaaatctgcctatctagcaattccactttgaagaattcattgtaggaattaacttagaatttatccaaacaaagtatccattttgcattgtcacatcaaaaattagaaataggtattcaacatcattagccattaggaaaatgcagattaaagccatgatgagatatcactacacacctattagaagagccaaagttaaaaggaaatatagtatcaaatgctggtgaaaatgcatataaatttaatctgtcatacattgcttgtagctatgtaaaatggtgtagccactctggaaaacagtttggcagtgttgtataaaattaaacatgcatttaccatgcaacccaacactcatttctgagcatttgttccagataaatgaaaatttatgtccacacacaaatctatacccatgttcaaagcaagtttatttgtattggccaaagactggaaacaaactcaagtggttttcaacagatgaatggttaaacaaactgtggtacatccatacaatggaatactcctcagcaataccaaggaacaaactattgatatacatagcaacttggatggatctcagggacgttatgctgacagaaaataaccaatctcaaaacattacatagtataggtgtattactccattttcatgctgctgataaagacatacccgaaactgggtaatttataaagaaaaagaggtttaatggactcacagttccatgtggctggggaggcctcacaatcatggcagatgacgaaaagcatgtcttacatggtggcaggcaagagagaattaaagctaagtgaaaagggaaaccccttataaaaccatcagatctcatgagacttatttactaccacaagaacagtatttgggaagccacccccgtgattcaattatccttcactgagtccctcccataacacatgggaattatgggagctataattcaagataagatttgggtggggacacagccaaaccatatctgtagggttccacttacataaatgttttgaaatgatataattatggagatggaggaagtaaaggggagtgtgattataaaggggtagcacaagggatcttgtagtgatgaaaaattctgtatcctgattgtggtgctggttacaggaatgtggacatgtgataaaattgcatttacttatacccacacacatacaaacagatcagtgaatgtaaatctggtgaaatctgaataaaatctgtagattatactaatgtcaactcccacgtttttatattgtaccatagatgtgtaagatgtaactactgggagaaactgggtatagggtatgtgggactttactattttgcaattacctgtaagtcaataatgatttcaaaataaaaggttaaaaaaatagaaataatctaaatgccaaacaataggggattgaattttttcaaaaacgtaatataatagaatactcactaataataataatgagagctacttaacatcgagcacataactgtcacgtcaggtatttgctaattactttacatgcattattttaattctagctgcagcctgcgaagtaggtatcattatgatctctattgcataaataagaaacttgagacttagataaaataacagcttcctgagggtcacatggttacaaagcagccagcatgagacttgaattctcacctgtttgaccccagagtccataatccttacctggtatttctctgctcttacagatggagtggccagcgttattttttatagttgtagaaagatgtcctcagcataaaatgtaaagtaaaaatgtaaggttacaaaacaatatataggtatgatcctatttcgggcatatataggtatactaaaaagtctggaaggatatatacaaacatttaagtgatggaggctggagttctaagtgcttatttatctttctgcttaacttttttttcaattttcatatattatttcttaaagagaaaatggatttaaaatttttcagtgggagggcagtgtgtaatatgggaagagagaagatattccctctattgccttcctttcctacttcgtatttttgtttcgtacattactgattccttcagctctctcttcccttaccctctaaatttaaaacatgttggatatgaggtgggttataaggaaaccatttcatcctttatacagattgctacctggaatgcttgtcctaattaccattagactgttatcagtgttttgttgtgcagttcatccgtgaaatggcaagagttacctggcccacccttaaaggatcttcaaagaatttgaagaattaaaataatcagttgcaattagggcatcttaagttttgtgggaggaaattcctataaaacattgttactttttaataatacaaacttttaaacaatgagaagataatgcctccctacacagaggaaatgtcctgagtttcacctccattgaagaagctgcctcctcagcaggacaaaggttgccatactgagtggatccattgatccagtcctcctgcagaggtctccaccttgttgaaagtctgtaatgggccccatccagcagttctgtctttcccactttgtgaaaacctgctggctgcagagctgccacatacctagactgggccaaggtttgtcctggagaaaggtccaatgcacttattcaacagttgcctgagccctgtgggcttacagacaacaaattccacagggagcctaacaaggtgtttcattcctgtggttttacagtacacttgcagagagggaaagatcttccttttcctggttcagggagtctcttgcacagattgtaatttgggggcctcagagaataaagacagctctcaggtttgtactaagtcctgtgaccttgcatgccttctcacttccatacattcaaactcaaagcatcttgacctttcttcctgtgtaaacctcgttttgttactgacagtatctattgtactttctcgactgcatcactattctgttgactacaattccaaagcagctgaactaaaggcaagaattccagtgatgtaacatagtctctgcgaccttcaccttgttaaatgcatctgaattctcctggttttgtagatcaaatggtagggaaccaaaatacacccatgctagttttaaaagtccttattctatattatagactgtgagtttgatttttatggcatattgttgaaccagttgttggcttatgtttctggctttgtgtggatgttcacacacatataagcagagaatgaaatatattgaaacctaaaagtcttaagtaatttttgttgcatatattagcttttacatttcccaaaatatgttttatggaacactttacccataaagtacttctaaaaatgaaacaaaaacttcatgattaaaaatgtttggaaaacactgctgactatggtctcctttggatttacataagaacagtaaatagtaaaggccctgagaagtcctgcagcaaaaaacaacacaaaaatctgttggctttgtttaactcagtgactttcaatattatttgggaatcttcccccctattcccaacagctattaacatcctggaatttaagtttctgagaaacatactttaaaaaacattgtaaataataagcctttttggagctccctctgtactggctaagtaggccacctctgttactgactagctgtggaaatttgacttcatttattaacctctctggcccttgatagcctgttaaatgtcgtatagtagttgtcctgactcttttggttctcaaaatctgtagttattttctttgattattttacactgaatagaaagagtccctactattgcttattgttacaagaaggctttctgagagagtgttctgttagcagaaacagaaatgaccaaacttggtgaggagatttaggatggcaaagcaaggaacaagacagggctagggtcaggtgttctgaatggaagcggatatctgtgttctttgacttggaagggaagcaaatgatgttttagggacacttttcctacaagtgaaggaaatcctcattcacaaatgtgaaagctacatagaacaaagtcaaaactgtatttacctattcttttctttctggattctttccctatgttgagtagtaagtattgagtggtcattttctgaaccattttcagcttatggaagcattgaataaaaagccaagtgtgttacaatgatacctctttcatagattaaaaagctaaaagagatatatgactgaacaaaaagccaagtcatttattgttcataaattagaattcagcataaatgtgctgagcaattagattcataagtaggaccatttagtaaagttacctaatgtatctaaatcaatttggatggaatatgggttaaaaagaattttaaaatcatgggcatcctgtgaggtttgaaactgctgcagattacagaagatcagagtgtcccagatatattaggaatgttaacatttcaaagaaaattcacctaaaatttggtttccaattaaaaagggggaaaaatgagtctcactgtttgttaggtgctctgtgatagtaggttttctcattgcttaaagcgctcctcagatgtgcccatcatctacatgtacagatgtagaaacgtattttggacaaatcctgaatataattgtccaaaatataaatggcagctgcaactaagtgttagaggtagaatttaacttcaggctggccttattagagaatttctttctcctgtaccacattgctttctagagcggtacccatggcattcataactactttctccaagatcttattctttcctgatgctgagaaactgctaaagaaggagcatgttaagaagtagagctcagataaattgagatacattgatagtgagagtattgactctcactatccaaacattccatctattatagtctcactgtactaactcaataaaagaacagcatggaagccttagaaacagaaaggtagtgaccaccaagagtcacttgtacgacgcttatgatgttccattctgtagatgcaacttatgacttcttacagtcaaaaactcaacctgtgcctgcctctcatagtccaggaagggtatctgagaaatggctaatgacagtttgggaaagagatgaatcatcgcagatgccacagttgccttccgatatttgaacactcaatgaaagaggaaatacctcctctttgacagtgaagagacactgaggcaaatgtcttagcagcaggaaggactttctaagtcccagagcagaatgtaccattttaggagatagcaagtgctctgacaagcgtgggccaacagaccatttggcggggaagctggagatgtgaagagttggtcgtgttgtggggtgggtggctttggtaatctctgagcatctaagattttctgtgtggctttatttattgtcaggtaaccatagatgtgatgcactcatttgaatcttctattttttaaagctgtttatttgtctctagtaagcttagattcatgttagaaataagtaagaaagcactcctatcacagagagtgttcctgacttttgggatcctgtgtcttaaacaattaatataaatgtggtctctcatgagcaacctctgatcattgccctgtgtgtggcagatcattaggtggctgtgaatgactattttaatgtcctgagtgggccctgatagtcatttaagaaatttagtacacagggatctagtcttccaaacccttttttcagatgatttaggaagcgttttattccttacaataaaatataatgactatatgagtttctttctgcttatcttacacctattgcaatcttgtcagctgtacattttgaaccaaatattgtatattctgccagtttttaaaatttatgtaggactcttctcatttggtggaaagccttgtttttctgtaggtcacctggaagccagaggaattgatttggaaagtggcggctagctgagtgccacatttattttatttggagcaataaacaagacagtgagaggtagctccccaggggacccactgagatggccatgggcatcctgtgtgtgtggcaggcaggggaggggcatagtgcctatctaataggacataggatgcagtccgtaactgtgtggcttgctgctctcctcccaaggctgttctcctacagctccatagattctggccaacccctcattcctagaatttctaccctgtgtgcagttatttacaagcattttcctggcaaaagagtaaagcatcatctagagctgctgccaacatttcaagagactgcagtcaccatcactttcatcctcatgtgtctccttcatcggtatcactatgatattgcagtaacatttgttatttattacataccacgcattgtgttatgtgctttacctgcattccctctctcattcaatcctcatgacaaccatttaaagtaaaagttattattatccccatttacaaatgtggaaaccagggttcaggcacatcatttactcatccaaggtcatggagttaataggtgatggagtggggaagaatccagggctgatggtggagccccagctgttgattactctgttgtcctgcccattattttgctcaattaaattgtttaaagcaaggagctaagtgtgtttcataggcgtcgttagaaaattttagttccatttgacccccatcttctgttggcagaggcagcaccattgtgtgtgtttgtgtgtgtgtgtgtgtgtgtgtgtgtgtgtgcgtgtgtgtgtgtacaaattgttgtgactttgttaagatgtttcaggtccatcactaaatgccacaacctcagacaagttcagcaacaacatatagagaggtttagttgtcctccttgctattaaatgaagtaagtcaataatgcctatttagtttctgtgttactaaatagcccactcttgaataacaatacctctaaaaatgcagccctgtggaattcagtaatgtgctaggtcatttgagaagacatgtgtctgagtctcttcagtcttcctgctcttctaaaacaaaatattataaaggagattggaaagataatattcaaatgtgatagccacgatcagtaatttagataacagcttcctcatccctaggaagtaatttgtacatgatgtgatcaaaacctaatgaataatgatttgtgtgtgtgtgtgtgctgtatgtgttaatgttttttaaaacttcagttcaggcattggaggccatagtggctaagccctcattgtacctgagggctcactagggaacagagtagctgaatgccagggttagagctgggggattctgggtcctgcagctggaagggctaacaagcaagaaggtagacagtaagactttgttttgaaacaattacaaacttacagaaaagttgcaagaattatacagagaacttctgtataccctttacccaaatacttcgttttaaatatttgccacatttattttatcactctctacacacacacgctttcactttttggaaccatttgagagtagaattcatacctcgtgttgttctttatggctttatactttagtatataaaataggaatactctgttatataaccacagtatagtaatcaaattcaggaaatacagcattgaagcaacttttatctattctacctcccatattcaaatgctgtcagttatcccaataatgcctttagtaccatgttgccccttgagtcaatttcattgtcattcctcttttgcctcctttaattgggaacagttcctcagcctttctttctctttcgtcaaattgacacttttgaatagtataggccaacttgtaaaaataaaatgtttctcattctggggttgtctgatgtttgctcatgatcaaattcagattacatagccctggctggcatacaccaaaggagatgttgtgtctttttcagcctattttacctagaggcacatggtccacctgactctcaccaatagttaattttgatcacctgattaaggtgctgtctaatttttctgctgtagtgttaacattttcccctggaaaaccaataagctttgtttttaaccctttccagtctttggggatacaaaaacaaaacaaaacactgatcactgaggatctagaagcaaagtgcaagtgtcaaaaaatcctgatgataagtcataaagtcatgagacattacagtggataggggccttagaattgccagatgtgtgtgaatgggagttaattttaatagacttaattttttctagcagttttaggtccatagcaaaattgaaccaaaagtgcagagcttttataagccccctgctcccatgtaggcaccgtccccccgccatcagcatcccacaccagagtactgcatctcttacagtcaatgaacctacgtggacacatcatcatccagaggccttagtttacattagcgtgttctacatggcaaatgtgttttttaaaagtcaaggtagaatgtacatttgctatactcaaaatattcagggctgttactttgcttgtttcttttataagagatatgtttttttctgtattttgtttttaattatgcctccttattcctttttataatgattctatctctatagtttacttcactttaaggtcagcttttaatatcatgtcagcggagagagagaaactgaagcagctgatggagcaggatgcctcctcctccccgtctgctcaggtcattggtctgaagaacgccctgtcatccgtaagttacatgtctgcctccaggaatgcctgagatgtgtccaggctcatgaatggtttgtaatttctatttccatgattatgttgaaaattcaggagaaaaccaaattatccaaattatattctaacctttcatcaaatctgcttatttgaaacaccaaaacttacctatccaagtcttaatagctagtattttattaagtgataccttctttaagtttggtttcctctgactgatcttaatttttttgtttctctaacatttttattgtacgtttttgtgtgtatgtgtgcgtgtcttacagacatttttctgttaatgcttacaaaatctgacagtttggaggaaattttatgggcatgagacaccacaagcttagccttactttccaaatgacaggtggcagagtgaaatttccaattcatgctcttatcttccctattgcaaagcactgatcctgtttaccactctttcaaagacatgagagctattttgtttgatgggatagtacaagacatttagcttccctgccctgcccccctactgtggctacaaagagatgagtcacatgaaagtgcctgtcaggcaatcactataccttcatagtaacaggaaaatcactgacagggtcccaaatgattctcagccattgtcactcattctctctccttttttcatcagtttcaattaattcctcagaatagttaggctccattaaagtgccatgtcctacctctatttgaataaagttatctcgttttttttttttttaccctgaatctatcaggaggctagagaacttttgaaatagcatactgatttgcttttactcttttcttgtactttggaattcctactttagaaagagaaagagtgtgtgcacatatgaaattgccatctgaagcaatactgaattttctatttcaggtcaggtaggggagataaattttaggatcttgtaaccagaagccaacacaggcattgagagaactagaaaatgttgattcatattttctatttatcgtattgccaagaaaagtgatgctcttaatataatgttagtgataaatcctctgccagtagcacatatagttgttgtagaatatgtaaggagtattcactgatggaccattacaagtatgctatcttcaaaagaaattaaaaataacattggcttgctccatatataaagaagagtcttaacgttgtcttaaggtcacagatagaatcgccccctttttattgtacaagacagccatacactggtgccattttggtttgagagaagcagaagcaaagtgtttttgttttttttccctaactttcttattgttctcattaagctagcttttagtgcatttacaaaaggtatctctgatgggcttccaaggtccctctccccatgatcttcctctccctgcctcctcccacagaggcctggcctcatcttgtcaatctgcctgtttggccactgagacctatttggctgtggtatcctaggccaaggctgttctcaccttcactaaggaattcattctcacccatattcacgattttggaaacttcagataaaaccgaatgatcctttctttcctttttggcttggattcacaattggggtttaagacttgttttttgaaaataaaatttttagaaccatatcagagttatcagaatgggtatgtcggtgctgtatgcacagtgttgccatgttttcttcttctgcctgtggcttacaaaggaaagaaaaactaataaaatagcacaattttcaggctgtactaagattctagcctccctacctctgtcattggccagaataaagttagtgctccagagagactgttatatgtggctgtgtgatcttagctcttgtgcagtttttcttaagtggtcctcaaggattttcaaataacccatatgctctgcagggactgaaaaacaaagccagcatccctgttggagatccaggtagaggattaggcagtaccacatccttctatgctttcagcaggtcggtcctgcaggccctggtggatgcaaaaggctcagagcttcttagaaaagagtcagaaagacagacatataggctgaatctgcatgcgagcacccgtggagctgatcgtgtgagtgtctgggaagacagtcaggagaacttgtcccccttccacagacagaccattggagaagagttggtcatgaagtgcacaggagtatcagcgtgaaggaaacagcttcctttacctttcagccactttcctcctagttgagaggttgagataaggaatgatccctgcccagggaaatataaaggaggcctgggggcatagtctcagatttgcttttcatctcacatttacccattcccagagccatggtccttaagcccttatgcaggtaagtgaggcttactcatttcttttttgaaatagattgccttagtcctgaagaatgaatagaacaatcaatacccatattggaaaagagtaaaattaatctttcacaaagtcctacttcccagcacacagcacactttctttatttctttttttttttttcgtgagacagggtctcactctcacccaggccgcaatctcagctcgctgcaacatctgtcagcctcccaggttcaagcaattctcccacctcagcctcccaagtagctgggactacaggtgtgtgccaccatgcccaactaatttttgcattttttggtagagatggggtttcaccatgttggccaggctgttctcaaactcctgacctcaagtaatctgcccgcctccacctcccaaagtgctggaattacaggtgtgagccaccttgcccggcctccagcacactttctaaaatctgattcaatgggtatgataattaagtaacattgaaatatgtccaatcataagggatggggccagcatattcttcaaagcagatagaagcctggattccttaggaagggatttggccaaagagactccagacagttggggaggaggaggagatgctgtggaaccactggtcttaacagaagccgacagtgtctgtgacttccctctctgttgcacttaccaaccctccctccatgtctggaatgagaaaagaaaaagagcatcatttccagagcccaggtttgtcatctcccaggcatctcagaaccagtatcctcttggagagcattcaaggaaaaagtccagaaagtgcgctgtcagaccacgtcactaagagtttcatcaagctcttagagatcgctcctgcagggcccactgctgtgcttttctgaaacatccatttattaacagagccccactattttaacatgttccaggccctagcacaaaacacagatcttaaagaacgcttacgcagaatccatgccgagtctctgctcctcgactcccccgctgtcgccaagtcgggtgacaatctggcagaggtgggtaggtttctcgtctggtaatgtctccccagctgccgcccgctcccgtgataccatctgtcccgttgcacgacctccctgcttcccctcatgggtgctgtccacctctctgccctcctcctctgggtgctggccacagctaggtcatggactggggtctcgggctcaaacgctttcttgagcgtatgctgctaattgcatttttaaactgcttccttccccagaactctcttttttttttatatttctgtttcgctcctaaatgtcacccctttcactagtggtactggagtgggaactatagagagataaacattttctcttgttactactgaagaaacctacgtttctctgacctgcagtatcttggttccctgccagcctccttcccctctaaccctttctctgtggctgttcccttctcccttttctgtgattttctttttcttttatagaatgcggctgtacactctgagggaaaaaaaatacttcattacaattaaagtgtctcttggtcagttaaaagtatgttaaaaaaaagtctttcttcaagactagggatgtttatccaaaatagtctttgcatgtttaaaatgagaaatttcagaaaagtacaagtaggttactcaaaaaataagtaggaaagagtaatgaaagtaaaaactgtttttaagctattttttatattaaatgcctgcttcagatatgctaaatttttattaacaaatgaattagactgagtacacttaaaataaaaaatgtaaggcaggtaatagacaagaggtgtgtgtttatgtaagtttttaaaagaagtttgtaatgtttaatcatagtgtttcgtccttctttttctgtcctcagagaaaacaaacccctcacacaccttcactccttgggaagccattgtgcggggtggtgaggcgagttgaggctgaagtcagtcagtacatggactgtagggctccgggcaccgaacccatttggagacaagatggtgccatgtgtggacaggcccatccactcccatgagcctcaccctctgtctggcagaagcttgtgggtctcttactacttctgaggcacatgctagtggttaagtatgacattcttttatagaagcgctacccacaagaggtcacttttcagttatgttagcccagacctaaactgtcacctgcagcattgagcacctaaacattacttacggcgccttgaccttaggcctgggcaggccctcttttgagtctgcacattggctaaaaacaggacccagtcatggccaggatcagccattactgaccagctgccatgtactatggtattatctggagtttgtgcatgttttcagacagtatttaccttttaaatagtattatcacaatttactgatttaacaggtagttaaatacataacgttcatttatgcttttatgaatttatgcttggcatgtctacttggaactatttgtgttttggaaaggaaaccaaaatcacaagtcttttaaaatacatgtttttaaactatatatttaaaatgcatattttaaactgatcttaaaagtagcatacctgaaagctgaaatgctatacactgtccttgagaggtaacaataacatccttcaaatgcacaccttccaaaacagccttcttgagtcttgaatcagtgatgcagttgtcaccttatctatttcctctttcagaaattttctgtttcccttattttatcccttttatcatggagtgactcaggcttactttcccagcaaaggtaaagttattgttgccttcaggacataagtaggaaagtaagtgaaaatggcctcccagactgaaaacttgactccagttaattttttttcggtaactcccggttacctctggtactctattgggaaatgacagtctccaccaatggggtcagcccaaggtgctctccttttagaactctcactttctttgctcacttcgtttccttttctttctttcttttttttttttttttttgagacagagtctcgctctgtcgcccaggctggagtgcagtggcaccttttcggctcactgccagctccgcctcccgggttcacgccattctgcctcagccttcccagcagctggggctacaggcgcctgccaccatgcccagctaatttttgtatttttagtagagacagggtttcaccatgttagccaggatggtctcgatctcctgaccttgtgatccacccacctcggcctcccaaagtgctgggattaaaggcatgagccactgcgcccggcctcgttaccttttctttagccacacgtattacccatctttggtgttgggcctggctaattgaattctaaaatgcccaccttttttaatatcagaaattacccccacagcctaccaagttctcctgttttatattcctgaatgtgaagatttaatattatcaagttatcagttctttgattattttagattccaaatgaaagggcaagtgactttgggaggtaacaccatactacatccaatgtccatttaagagactaaaaaaggccaaaacttttaaagaaaagtctgaaagagaagggaacttaattcttttaatgtctgtttgctatatcggcatgcatttgaatacattacctcacaaaatcctaaccatgactctatgaagtaggtggtgatagtttcatttgagaaacaagagaactaaagctcagagaggttaaataacttcctccagacatacagcttgtaatagacagagctgagatttaaattcacatctaacgaggccaaagcaatccttttctcaatagtatacactgctatataatgaagaacggtatgccaagccagaaaataaaacactcattcaagctccagcagttaaaataagggatgatgggtaagaatgggacagaataactctctcaagcatagatgttattttgtatataaaagaaataaagattatggttcaaaaaggcatcaaaagccaatgggaaaggggtggattattcaataaattaggttggcacagctcaaagaaatttattacattattataattaattaccattattttggagacagtcttactatgctgcccagcctgaccttgaactcttgggctcaagccatcctcctgctttggcctcccaagtagctgggattataggcactcactacccaccatgccctgctgaaagcaatttaaaaagaagtttaaatcttctcattgcatgttaaatgaatcaaaagcaaattcaagttaaatataaaaattcaaactgaaaaatattaatgtaaatatttatcaaactgctagagtagggaagattttctaaattgggttgcaatagaaaaaaattgcaaaaggaatgttgattagatctattttttttttttttttaggaaaaagtgatgtgtgtcaaaacaataaggcaaataatagactgggaaaaatattttcagtgaaattgacagactgagataatgctaaatcaatgataatgtttttcatatgtaaccaataaacaaataatatcaagtaacttaaaactttaacaagtaaatggaaaaaggccataattcacacacacacacatacacacacacacacatacacacaaatacagataggtatgggttttcttttttttttttttttttttttttttttttacttattttgcaatatttgtaaattcacaggaaagtacaaagaaatgcagagggaggtcccatgcagccttcatccagcctctccctagaataacatctctacaagcttgttttttaaaaaggaaaaactattcagcctaatgaaaattaaaacaattagattagctcaaaagttttctaaattatggtatgcagtacccttaatgtagaaaaaacagaggtttccttacttgttggtgtaattaggtaatatatattttgccttgccttgaaggttattaataattctttgaaaaattgattctgagaaataacatgatacaagcaaagacatatttacaaacatactaaaccattttcgcaaatctgtaaacattcttaattttattattactctgtgacactatataataaaatatttatcaattacagttcactgtctcaaagaattttgaatggtctgggaaaatattaacaatataatggttagtgaatggagcagacaatatgtagactgtttatcccagtttttcaaaataaaatttgtacacagatattttaatatgaaaataccagcaagttaataggggccacgtccacttccacattcatatcgacttcaatgggacttgaagtgatatttatttaatttgcttttttaaaattttctattttgaatacctatttttattttcagaatacagtttaattttgaaaaaaaactatcttgcaatgttatttgggcgaactttataaaattacatacatagagatatgaaaatagcatgattacaattactgcacaagaaatgtgtcagaatgcttgtagtggttgttatagtgtgagctatgaatgttcctttccctcccttttctctgtttatttaatttaggggtttccaatcttttggcttctctaggccacattggaagaagaagaattgttgtgggctacacataagatacactaacactaatgatagctgatgagccagaaaaaaaaaaaatcacaaaaaaaatctcataatattttaacaaagtttacaaatttgtgttgggccacattcaaagccatcctgggccatatgtggcgcccgggctgtaggttggccacgcttgatttaactttttgtaatgcaaacaatagataagcaaccagtcatgcattacatatgtgaaaggaaattactgaattgaactgactgggttaatattttagcaaatgaggtcctgagttgtttaaggcaccatgctgtagacttggggtgcagcagtgctggtgagtttacagtacatataagaagatgccagaaagggctaggggctaggaatattattttcagtgttggtcagccaggaaatctttggacccatcagtctaggaggaggaagatacagagatggcaggagtgactagtaataaattaatgagtagaacaagtaaataaatgatgagcatcttttgtggcaggagcacacggaagacacaggactattctcttgtttgagtgagtgttgaagctattccttacgatgttttcaagctcaatagctttatgcctggctcttttgaggagagagaccttttccttgaagttaacagctgtgatacttatagattctaaagtgatctctttgttagggtagagaagaggcttggttttcagaaggctacatgggtattaaaatgggtaggattgttaataccttgggcagatgccttatttaggaaagggatatctatttcaacagtttgtagatacatattaataaactgaagcaagcaatttgtaaagggaccacttgccttttattaattacgaaaatctgctgtggccctcctgtcatagcatcccctccctatgagactgaggggtatatcctgaattcagacaatttctgggcaagatataatctgccttttccccaaattattctggatgatgtggaagcaactcctttgttagcccaataaaaaatacgagtggttttactactacctgtctactctgattgaaagaaatcaaatcatcctgtcctgaatctgttctttttcctcaagtgccacttctatgaagccctcctcaaacaaaatctccctaatcagaatcagtctctccactttgccagcactttgtctattccacaggcctggtctgatgtgcgttggatgcgttctctcaccattcattcagtccacaaaccttgtctggttcattgttatatcctgccatggccagctcaggacttaagtcctccccagagggaaagtccagacccagtggagtggagaatggagggtcatgcgagataagaaaacaatgatgttctgttgtgttatttgtacagaggcttataaagaggactggggacttcctttccttgcagtcattgtaggtggaaagagacagacaaagagaacttacatcattcatccatgaatagtaaatgatctgccaccagggtgcttctggaccaaaacacactgtgtatttgtcaagggacacctcaaaagcagcatattgttccctcagagagcataggggcagaagaaagctatgttgctctgaaccagccatgcaaggacatgaattcagtgcaatgcagaggagattttagtataaaaagaaacatccagcagtggtagcgaataagaggatatgattcagagagcactggaatttttccccttttaaatggaacaaagagtgacctggacagttgttttttgccttgtgatttgttgcatgtgtgtgagaagtgatagtgcctgtaagtgaggtgcccatattgggggagaacttttgtgttttgcatgaggctcgcatctcagtgttggagctgacttctgctttgagttgcttatttgcatgggcctgtgaccttgtgtattgtacaactaaatcatttattttctttctcttgagaatgtttttaaatgtatacatttttggttttgttcttcaaataggaaaactccagagatgaaaaccgagctctagttcatcagctttctaatgaaagtagactctccatcactgactccctttctgagttttttgatgctcaggaagttctgttatctccaagctcttcagaaaacgaggtttgagcaatgtttacagtatggtgcctcaaaaatctctcttgttgctttgctgattaatctgttcagtaaataatccatcatcagaaacactaaactcagttgccctttgtagtcattatgttctgagagttctcccataactcatacccaaaaagtataaaatgatactatatgtgagaagaaaaagtaaaagtagagagcattggatattttctcatttctgtaacttgatatgttaaatttgttatacttttttttttttttaaacagagcctcgctctgttgtccaggctgaagtgcagtggtgcaatctcagctcactgcaacctccggctcccaggttcaagtgattctccagcctcagcctaccaggtagctgggactacaggcacgtgccaccgtgtctggctaatttttgtgtttttagtagagaccagggtttcaccatgttggccacgctggtctcaaactcgtactcctgacttcaggtgatccgcctgcctcagccacccaaagtgctgggattacaggcgtgagccactgtgcctggcctctttttttttttttttttttttttttttgagacatagtctcattctgttggccaggctggagtgcagtggtgtgatatctgctcactgcaacctctgcctcccaggttcaagcaattctcgtacttcagcctcccaagtatctgggaatacaggcgtgcgccccatgcccagccaatttttgtatttttagtagagatgggcttccgcatgttggccaggctgacctcgaactcctagcctcaagtgatccatccgcctcagcctctcaaagtgctatacttcttttcaagtacaggttaatagttttgacttctacctatttaataatgtgtctactatagagaaggaaattagcatcccgtatattttttaatcatggaatttgacatattgatttataatatataattattatatttttatgataatatggttattgtaatattggtttatagcattatttgttttaaattgatgcataaaaattatcctttcctgaataagagttattatagttaacagtgtgtactaataatgttaccccttaaatacagacttagtcattttgtttatgtattaattcccatagaagatactttttacacaaatagctcaaagacaaattgtaacttcttctactcaaacactaataaattctaaaaatgcagtcagaattaataagaatctttataataacagtcttgagcttgcttgctgttttccttgtgagaactaattcggaatgtgtaagaattttaagaacaggtgtttgttgtgaacacctccttggcagattggtatatggacctttatgaaaacagtacccaagagtatttgtactgtgagactcaacatgtttgatcatttagagtaagggttttatgaaaatctggctcttgtttattctaactctaatgaatgttatttcttctttcccatagatttctgatgatgactcatatgtcagtgacataagtgataatctttccttagataatctcagtaatgatttagataatgagagacagaccttgggtaagatttacattatttaatctctgaaaagtttggattttcatacaatactaataagttgtatagttgactcttgaacaatatgggggttcaaggtgctgataccccatgcagatgaaaatccatgtataacttttgactccccaaagatgtaactactaacattcgattaacacatattttgtgtgttatgtgtatttgaggctgtaatcttacaataaagtaagctagaggaaagaaaattttattaaaaaaatcattagaacagaaaacatatttacaattcgttaaggggatcatcataaaggtcatcatcctggtcatcttcatgttgagtaggctgaggaggaggaagaagagaaggggttggtcttgctatctcaagggtagcagaggcagaagaaaacctgcatacgagtggactgatgcggttcaaacctgtgttgttcaagggtgagctgtgtagaggacccgctacaagcaaagagctctagcaagtagtatgtaagaaaactaagacatggaccccaccccctaggattttataatctagcacccacatgtgaaagatgtgttaattcaaataaatttgtctgcttatgcaaatttttatttttataaagtgagtgtatgccaattataggaatataaaaaatgtaacacatatctttttttttttttttttttttttttttgtgagatggagtctctttctgtccccaggctggagtacaatggtgcagtcttagctcactgcagcctctgcctcccgggttaaagcgattctcctgccttagcctctggagtaactggagaatacaggcacgcaccaccatgcccagctaagttttgtatttttcggtggagacgaggtttcaccatattacccaggctggtcttgaactcctgacgtcaagtgatctacctgcctctgcctcccagagtgctgggattacaggcgtgagccaccgtgcctgggccagatatcccttttgcactctaatgttctctctcaggacatgttagaatatggctttttgccctgagatatcagggggtttttataatttaggaatgtgataggacttacataataaaagatatgatccaggtggtcatttagcttcagagtcttcaaaacaacacatttgaaagtaacaaatggctatctcttggacggacccatcagggtatcctaagatgaccctttattactggttgatcccaagatgggaaatgatgggcaggaaagatatttcataatgctagttcgaactgtggaatatctggagtgtctggctagccccccaaacagctctgatttaggacttcagtaagcagactggcctgtttaggaaggtgcccttaaaaagaatctgcccacctgaacagttctctgcatgggtcctcgtagcatcaagcacttatcagtcttggtactcagtctgccttggagtctctaggtttgtctgcactatgcattggatactcaaagcaccacctattttcatatcttcacaaaggagagggaccatgccaggcacctttttgatatttcaatgttcctcagctcagtgtgtatgtgtgaacggatgaattgttatctgaatggttaagagccaccttttgggggaccgcagtataggggaagaaagcaggtaattttaccatgctttggaagagtatcctttcagtatcacacctgctagaagtaagatgctcatcgtggttggtattttgtttgaaatgtttcttgggagatgaaccccttagtggaaaggtctaagaaccagtgggtttgaagaagaaggccaaaaacactggagcaagtttgtgtgctgcttatttttctagaaaaacaaggaggcaagttgaaagagaaatgaagaaacatcactcccttggcaaacagcatgcacactaaagtggtgctcccactgtagatgaggaggattgacaaatgtggaagtcctccatttctttgagtctatggagagggagccataggaagcacaaagttaatggaatgttcagaggtcaaaggtcaagagaggacatggttcagaacctaagtccacagctgtgctgtgttgacaccagccaggaaaagcttagaggttagagctggttctgtcgtagtttacattcatgttgcgagaatgctaactaacattgcccttttttgtgtatgaagacagggtctcactctgtcgcccaggctggagtgcagtggtgcgatctcggtttactgcaacctctgtctcctgggttcaagcaattctcatgcctcagcctcccgagtagctaggattacaggcacgcaccatcatgcccagctaattttttgtattttaatagaaacagggtttcaccatgttggccaggctggtcttgaactcctggcctcaagtaatctgcccgcctcagcctccgaaattgctgggattataggcatgagccaccttgcctggtctacattgcctttcttgaacaaacactgggcaaaacccagttttcttctttgtcagtgtttgaatactagaaatgtgtgtcccctagttctttacagacattcccaggggttgggggagattatatttctaagcatcaatactctactgaaaagattggatacagaaataacctttacatttcatatcatcattttgcctgtgttaggaccaagatcttgctacactgttattctttgagtttatagtaaacatgaggtttttagagtgtttcctattaatttcttccccacagtgttgctgggcacatattaggacctgtctctatgctgggtactttggggaagttaagtgtttaagaatacagattaagggaccagacttccttggttagccccagctctgccactcagtggttgtgtgttctgggaccagatacttacttcctctatgcctcattttcttcatctgtgaaatggggataataatactgtttaccacaagtggtagttacataggataagtaggaataatgcatgtgaaatgcttagaagactgcctgtcacagaataaaatgcaagatatgtgttagctgttagtagtattggtggtgatgatggcggtggagtagcatgctttcaaaattcagattagtgtaatcaaagaaaattttttgagactacatgaaaaattgttttcaaaaatgactacaggcaaggcacagtggctcacacctataatcccaacactttgggaggctgaggcaggaggattgctttaggccaagagtttgagaccagcctgcgcaacatagcaagatcctgtctctaaaaaagatacaaaaactagccaggcgtggtgtagcatgtctgtagtctgagctactcaggagactgaggtggaacaattgtttaggcccgggagttcgaggttacagtgagctatgatcataccaccgcactccagcctgagtgaccctgttgagaaagaccctatctcaatatttaattaattaattttaaaactgccatttgcagctacttacctatgttgtatttacccatattaagcaactaaaacaggctgggcgtggtggctcacgcctgtaatcccaggactttgggaggctgaggtgggtggatcacttgagctcaggaatttgagatcagccttggcaacatagtaaaatctcatctctacaaaaatacaaaaaattagccaggcatgttggtgtgcatctgtggtcccagctacttgggaggctgaggcaggaagattgcttgagccggtgaggcagaggctgcagtgactccagattatgccactgtactccagcctgggcaacagaccaagactctgtctcaaaaaaaattaattttaaaaaagcaaaacaaattcagaagttaattggatgattagattaacatgagatgcacagtgtggccctgttttcatgtgtttctgttcatcagagcagcccctttattcagtgattggctttataataagtaaatgttaaatatatatgtttaataaaatatatatcaacaaagtatgtttattgatatataaataaaaataatatgcaagagatttcatttgaaaacaggcacaatggaggataggaatttcagagcatgaaacgaaggaaaagattgatagattggcatacctaaaatatgtttcattcatcaaaatactccatgggccaaatttaaaggtaaataccaagtggggattgaattgtaaaacaaatataaaacaagagagtatggtgttaatacataaataggaaggcagacaattcagcaaagaagaagtgctcatgaaagcactccaaaccacacaggaaatcttttaaatgtaagctagaacaaggtggttacactgtccacctgacaatttgacagaaattaaaaatgaaaatgacaagcctgaagaggcctcaggagatggatgttcacatctgctgccgataaatggggaagttgggggcagcctttttgaaaagcagtctgatcatgtgaatcagaagtctaacaacattcagagttgttgacatagtaatcccgcttcttcatatcctaagaaaataaagatataggcaaaaaatattttacagtctttaaaaatgatttattaaactcttaggttcaggggtacatgtgcaggtttgttctataggtaaattgcatgtcacggtggttgctgtacagattatttcatcaccaaggtaataagcatagcaccaaataggtaggtttttgatcctcacccactacccaccctccacccactctccacattccagtaggccctggtgtctatggttcccttctttatgttcatgtgaactaacgtttagtacccctttacaagtgagaacatgcatttggttttctcttcctgtgttagtttgcttagttaacggcctccagctccatctatgttgctgcaaaggctatgatcccattcttttttatggctgcacagtattccatggtgtatatgtaccacattttctttatctagtctactgttgatgggcatttaaattgattccatgtctttgctgttgggaatagtgctgtgataaacatacacgtgcatgcgtctttatggtagaacaatatatattcctttgggtatatagtcagtaatgggattgctgagttgagtggcagttctgttttaagttctttgagaaattgccaaactgctttccacaatggctgagctaattacattcccgccagtagtgtataagtattcccttttctctgcagcctcaccagcatgttattttttgactttttagtaattgctattctgattggtatgagatgatatctcattgtggttttgatttgcatttctctaatgattagtgatattgagcaaaaactgatgttttagaaaaattttaaataatatggaaaaatactctgttagctgaacaagcagaatataaaatacgtatacagtatgaacaacacaaatggagaaaacacgaaatgaagatactctaatatataaatggctgctattttggggtggtggagcaatgaaaagaccattatttcctttatagttttcctgtaataaacacaattgttttaccagaatttaaagtgattttttaaaaagtttacaagtttttataaacaataagcaactataggcatagaaatccaatttccagttttattctaagtgtgtatgagctatgaggaactaggttttgaggagcaattcaaggtcttccctgtgaataaagtcgatgggttttagtgtgtgtcatttttggtatttaattgctcagaattcttttgccggttttctgacttcagccatactctgaacaactgagtttaatagtaacattgactacttgctacgtaaggttttattcgtggattaaaaataatagaataaaatgaaaagctttatagagacaaccaggcctctttccctttcagggcctgtccttgatagtggtcgggaagcgaagtcccggagaagaacgtgcctgccggcgccctgcccgagcagcagtaacatcagcctgtggaacatcctgaggaacaacatcgggaaggacctgtccaaggtggccatgccggtggagctgaacgagcccctgaacacgctgcagaggctctgcgaggagctggagtacagcgagctcctggacaaggccgcgcagattcccagccccctggaaaggatggtgaggagtcagccttcccttgccactgtccagcctcggtccccaagccacgaggccattcacggggcccatcagagagacagcccctgttccctccggtttcattttgattgttccgtaaacaggttcattactcagagctgtctggcttcctccgcctggctgtttccagtcaccttgtgaggatttggagacggggttggggtgcttctccgtggcacttggtgcctggggtagttctgttctgtgggtttgtgcttcctctttctccagaagccttctggctgattgttccgatgtgcccggctggaaaacatgtctttagggctgtctgcatgtttatttttacttccctgggtggacagaatttaatttctcgagctgtttttctcatccagggtaagtttcccctgagaatgtttgtgtttatttctggaattgtcccatcagctcctaggtttttggaaaataaagttcacaagaggaggttttcacatcagaaatattctttttttctctctccctcttattttatagagtacttaaaaaaaatcgtagaaaagccttctcttccctactgggcatcagctccagtcacagcatgctggcttttaaaagggcttccaagtatttctcatctttcccccatctcatgggtagggagattgggaagggagtacccaaagggcaagactctgggcagatcagccctctctatgactgtgactaactttgttcttgaacgtgggtgtctgtaccgctttttgcttccttatattcagtgaccttagagcagtaaggtcattgtctctatgggatgctgggacagcagtgtcccccagatgcagagtctctctcctgggcatttgccaattggctacattggaattggagtgccccctcggcttcacagacctagccctgccgacactccccattgatagaggatgctattattttctacattctaagcattctgcagttctagcgctcattaaaacatcattacttcaatgatttgaagattaagggggaatcttaactgctgtctgagagggatagcccatagtcattctgcccagtctccagggcctccccatcaaagagactttctctttttttgagtcagggtctttgtcacccaggctggagtgcagcggtgcagtcctacctcactgcaacctcgaactcctagactcaagcaaccctcctgccctggcctcccaaaatgctgggattacaggcatgagtcactgtacctggcccaagagacttactttcttgttactgataatcagggtaggagacaaaaacaagctgtattttttaaactcttctttgttacttgtccccagataatttttgctgaataaaaggaaggcaaatcttctagaaatagcttctaagcaagtgttaaaagtcagcatttgtggacagctcttttctttaaaggaaatgattggctttgaggatgaaagtttcttaaagatgtttcatgctgtggcaatttagagacccttaggatattcagctgattgatcagtgtaattgaccttgagcagaggtttgaggagaggcttctcatccccaacataaccactaagcaggagtcttatctcatgggttttgtttactgtcctgcacgtctgcttatgcccctgcctggactctccctcatgccaccaacccacagggagagtgcttccttctgcctccccttcgctctgtcttccccacaacatcatgaatggcactaggttctttcatcggttgtgttctattttacatggtgaaggtgattaagggttgattcagcattccatacacagtgtggctgtactgtttcacaggtcaccaatgtggagaagcaggaagaggaacagacacccaggtttcaagaacacaggcagtcacaagtaggactgacttgagtgcagttgattttttcttcttcttttttttttttttttttctttgaggcagagtctctctctgtcgcccaggctggagtgcagtggcacaatctcggctcactgcaacctccacctcccagattcaagtgattctcctacttcagcctcctgagtagctgggattacaggcgtgcgccaccacacccggctaatttttgtatttttagtagagatggggtttcaccatgttgatcaggctggtctcgaactcctgacctcgtgatctgcccacctcggcctcccaaagtgctgagattacaggtgtgagctaccgtgcctggcccttctttttttttttttttttttgagacagggtcttgctctgtcacccaggctggaatgcagtggtgcaatcacggctcattgcagcctcgacctcctgggctcaatcagtcctcccacttctgcctcccaagcagctgggaccacaagcatgtgccaccacacccagctatgtcttttgtattttttttgtagagaagaggtttcgccatgttgtccaggctggtcttgaactcttgggctcaagcagatccacctgcctcggtctcccaaagtgctgggattacaggcgtgagccactgcacccagccgagtatagctgatttttataagccatccagctgctctagagaattctatagcatgaggtggtgaggtggtccctattacaggcaacatcaaaaatttagcagaaggttatgtgactagtgggcatttatgaaaggcactcagctcttcttcagtataagaaactgcacgaaatgtgctgggaagaagaaatcttgagattgttactacctgacattagaaaggaaaattggacatccctgcttaggcttaactgttgttacatacatggaagaaaagacaaagaaggtaatgtgcctccctgatgccctgacggggaattgctaaagacgccaagacctcacagtaagggctgcccagagagtttgttcacttcgtgttcacgtaaagtttttcttccttcctctctttattttaattttttttttggatgtttcacttttcctcccaaaaaagcagaactttaaagtcactatatcctgtggcttgtttcccaggcttaggaaatgactcacagattttctttggtcaaaatgaatgttttggtttctataataccacattttgaatggttaaatttatgatgctgattcctgagttttggagggattttttaacactccttttttaatactctttccccactccacccctgaaggcttagcaccatattaggatcctcagatactgtcaggcttaaaagtactggactcagcttaacagtttccagaaacagtgtagtccagtttagaaatgtcatcgtctttatagcatctcccaacttttaggcatcaagataaatggacagctttaaaacattgggttaatttgttttggggcccagataaacattatttaaacctacaattttaaacctatgttgtttaaaaacaaccaaagacaaatctttggctttctgaaagaaaatcatagaggttttattttgtttagttctttgtgaacaataaagctcttggtgacacggaaatgacaaagttcttttctcttgtccttaggtatatgtggcagcctttgccatatcagcgtatgcatctagctactaccgagctggaagcaagccatttaatccggttcttggagaaacatatgaatgtattcgggaggacaagggcttccagtttttttcagaacaggtagatgtacaccattttttgcttgttgggaggggttgcttatgtctcccattaaatgtgcttctgaaatatttatcttccacctttcactggcttcaaagcagccgagataattacagtgcttttcaacataaagggagggatcgatttcccttccactgaagccaagccaccacccaggggcataaagttaccacccgtaattctgcacacttgcttggctacatgcattgccggtgtcctttctctttaaaatcattagcacaaggaattttgaaaggatgaatgttggcccaaacttcaatttagaggtttaacattgctccctaacacactgacatcattattccagagcatgaatgcccccagcagagtgggtagcgccagataaatgcgttattctcaattttgatttgagaggaatcattcattcatgtatttattcattcacatcaataaattatttctagaacgtataccatgtgcctgccactgttccaggtgctaggatattgcagtggggtggggggtgaggggtccggacaggagtccctgccctcatctgatggatgcacaaccttgtactcatgcagcctaaggttccatcacactcttgccatagaagtagcatagagtaatactcaggcttcagacagcccaggatccgtcctacctcagttctacctcttactagcatgataacccaaggcaagttacatagcttctctgtgctttagtttgctcttgagagtggagaggatgacagttatatgtacctcacgtggttttgtgatgattcaatgaggcactgtctgcaaagcacttggagcagcatctgagacatgaagatacatgttatatgagtgtttgctgtcattattgatgcatgccagcagagtttataatggtggagtgttgggaacatctaaaatgcttgtcaacaggggattatttacctaaaatagagtgtatacatattgaaattttaaaaaaaacctctaagatatgcagaaagaaattttattaaaattataacaaatttaaaaaataaaatacaccctctcccaccttgttaaggtagcaatcaaacacgtccactctctgtatatccctaaatccctagggacattagacatcattgcttctgtacatttctcaccccctagttcttagagaactgaggagaaggggggtggattgctaaaatattcttttatcttgctgctctctttatcaatggatttgcactacagggagaggaggggaagcgtgggttggctgagagacttatgatgatagtgcttatcttaactgtaaatgataaggagtgttctctggaactcaaaggaaagtgaatatacagtaacccaaagcacactgtcagtagcttgccagttagaagctaaaacaagaaattaaacatggactaacactggggaagtagggagttaaatcagtagttaaaggggataagataatctgtgtgattcagaattcatctgggttatttaaatactgaacctaaaatagaatgagaataaatgaaaatataatttggtttccatggtatcatatgcactcttgtgaaaaaataaaggccaaaaatagcctcaaactacagcagacaatcaggacaggatgaatagctataagaaaagaatagtaacatgagctgtgtaaagttgagcttcagtcctctgagccctggtgggacagggccaaattcaagatctgtttgtgtatttcccatggtggcacagtgggggagaaatcagagctcctgggcacatgtgcacaaagacagaaagagggttacataactcagcatttagttccatgaaataagcaagaaagagaactggttattgttagtagtttagaatgtgctgggtgtaggatgtacagacctgcctgcttcaaatcttaactccacaatttgctccatgtgtgaccttatgtaagttccttcaactttctgtgccttcctttttaaaaaaaaaaaaatctgtaaattaggaatgataatgtttgactaataggttgtagtaaggcttaaacaaaataatacactgatggaaatattcagtaaatggctattgctcttatatttagtgggaacttctacgatgcctttctttttttttttttttttttttttttcagacagagtctcactttgtcgcccaggctggagggcagtggcacaatctcggcttactgcaacctctgcctcccagttcaagtgatcctcgcacctcagcctcccgagtagctgggactacaggcttgtgccaccatgcccagctaagttttgtatttttaatagagatggcatttcaccatattggccgggctggtcgcaaactgacctcatgggatccgcccgccttggcctcccaaagtgctgggattacaggcatgaaccaccacgcctggcctacaatgccttttaatataaagtgttaagaatagtaagagtttggaaggctgaggtaggtgaatcacttgaggtcaggagttcgagacaagcctggctaacatggtgaaaccccatctctactaagaatacaaaaaattagccaggtgtggtgtcacatgcctataatcccagttactcaggaggctgaggcaggagaatcacttgaacctgggaggtggaggatgcggtgagccgagatcgcaccactgcactccagcctgggcaacagagcaagactccatttcaaaaaaaaagggaaaagaatagtaagaggagtgttgacaaggcagagaggaggctgaggaatgacttgatgaaagaaaactagaaaggcatatatctataatatatactttcttatgttcaaataagatatgctatatctccacttctagtacaagtagtttgaaggggacttgatgtcgctggtgagtctctgacagaaaatggctgtcaggcagccaggagttctcacagctggcttcaccatggtcataccaccagtcctgatcatcatggagctgcttcatctgtctggaatttagcctgatggctgcagatagttggttattttaatatacctaagaatggatgagtctctcagggataaattcacactaagcttacaagagactgatgtatataaactagaatgctactaaatgcatttactgtgaaaaatagacctgctatggggatcagaaagcattgtccagtgtgactaggtatgattttcccataggcagattacttgggaagccaatgagaatcctaagtgagcatacagtgtgaagatgcagctatgtgattcagtacaccaggcagtcctctgccctagaagtgggaagggtgtagggccagggcctccctttccctggccagcaggagcctatcagctcagtacccctctttccctctcccaatgctgtctattctaatttaacacatctgaagagagtgccagagcatttattctgtttcctgctggtacctggtatggctctttctgcctccagcccaggagacagtctaccttgatggagacagcatgactccgcccttgtccattatgtgtcattgataagctctcatggcttagaggtttgttttcttgtgcctctctacaatgagtacaggtttctggatgactagtataataaactgggcaagccccccgaattaatatttttgggtggaatttttttctaaggaggatgatgatggaaattgtatctccaagcttaaggacctggcaagaaacagcttggcttttcttctgagttttctagacaacagtctgagttggaaagtgatggctgcctctcttccaagccccttgattttgttgtcttgtggatttgctgggcatgtggatgttcgaggtggtgagcagccaggcaagtggaagtcattgctgcttgagagttcgactctgtcgaagcttgcctctctgtattgtttctcgtctaaaagacccaaaaccacaacatcaaaatgattcatgtggtcagaaatcagagaaagcatttcttgttaaaaatttttcttagaacaagtattagatttgtagagtgctccgtgcattcatgatcttacttgatctccaaaacggcgctctgtggaaggtgaggcagggatcagttacaggcgagaaaaccaaggcctagaggatttgagcttcccggtgcccctcagcaaatgctagaacccagcccctctgtttccatccctgcctccttttccccttactctctgtggggtctcttgtgtggactcagtgactatgctcagagctactggagtacagtatacacaaagcagccctttgtgtatgctgttcgttctcaccatgcaaaatctctccagactcacataggactttgttctccactcctgtggtaggcaggggtgtggcctttgtgaaagaggaccgatcaggagtgagtcatagacattcctgtcctaggttctgaccctctggctcttccaccttctcagaggtttcctttgtgccaaaaaatcggtttcaaccttggctttctacataaactcacaaaaggaagaattcagagaggaaggacttcccttctttccttactgttcagggactaagtatcctctggcaggtgattccctgcttgctgcgtcctcctgctgcctggcagagctaacacactggttttgagctgcatcaagggaatagatgggtcagaaaacttatttcagttggctatgttccttttttcatacctttgggaaaggtttggtgttgaaaggatatgcaattaagctacagtctaaaagtagcttttcctaattacatgaaactttagttgtccagatcattgttcattttaaccatttacccacccacctgcatacccttgacagtgtcagaaaagctgagtgcagttattaaaagttactaaaatgtaagagattgaaatgaagatcttttcttttgctctacaggctcagcctttcttccttttctgttatttattggaggactctgagtccatacattcttggacaggcttatacttgccacacccatcacttcctccttgcacactcatgtcacctctgcatagtccttgtatctactagttagcagagttatttattactgattaaataagtaaagatactgtcaaagggtaaattcttaaagacactcaaagggtaaattcaagccgttcaaataaaaccagcaataaatcaaatatgagacaactaaaccattgctttgtggttttctccatttctaggtcaagtcagcacttaatgtgtttttgttttttaattttttgcaagaggccatgtgtttatgagataagtgattcactctgaacatgggagaagggaaaataattggcatctgcattctccccaaaatcaggccagaattcttggcatcatccttaatagctctttctctcatcattcacatcctctcatcagcaaatcctggggtctcccttcagaagccttccttctacagccagccattttcactttctctcccatgtgatgctggtcacctagctcaggccactaaaatcaatgactgggattattgcagtaggactcactactggtctcctgtttccagagccagttaattccttatccagcagccccagtgactgcttaaaacagaagcagcagctgctctaaatcctccaccaacttcccaagtcacttggaataaaatccaaagtcctggccatggtccacaacgccctcgaaaatctcaccctcagacacttctcctacttaccccacctcctcatttagctctgccagactggccttgcttcttctgcttcataccaagcattttccagccattggcctttgctgtgtcccctgcctgggacgtgcttctctcagatatctgcatggttaacttccgaacttctctcagccccacaggtttccattattagagtcctgccccaccaccctgtctgaccagcactcctactcactgtccccacatcctcatgccctgctttattttccttaacacaatttctactgacaaattatgtgcttcttatgtgtcgtttgtcttacccacttccatactaaaatataaattccatcagggtaagaatttttacccttggtgactaggacggtgcctgacacatcacaggcaatcaataagtacttgatgagtgacctggaaagaatggccacttggtcccctctctggatgacttcttcacctggcacttgccctctttttcgttattgccctgtattgctgcagggaaatcaggacctaggaggactggatagttatgccttggagcagttgcaggggagaactgatgtactgaagggctacttttctaaatctgaaaaataaaaacttacaaagtacaaaaatactgaaaatacctccttttcctatctgcttctcccctgacctcttatataaagtgcattcaaagcataaattaaaaatgattaggtcaaggtaaagaaaggcctcagatatataaataaattataaattaccagaattcttaactgccaggggaactgtattggggcttgtagaaagaaagatagatacatgtgttaccatataaatacttgcgtaataaaaaccatgtgtactaatttcttgaatgcttgggcatccttaccaatcaagaattgctcttctttgattggagaggacgtgatagggaagaatgcttaaaaaaaaagtctaaattgggtttattcaacaggctaacagacagcatctccttccagggctgggtcaattcagacaaatgcatttactgccctttttgcctgaattaaaatgtaaggagaatacagactcaaccaaaatcctgcaataacaaagacaggttagattctgctcattattctctactctaatagattttagaaagattgccatcaacaaagattaagtgattaactgtgaattacctttttccatgggcattgaagttaatcaaagcctttgtataattttttcaagttggccagcatccgccaccacctttgatgctaagattcgaagaagacattaacagcagatgttagaatcagagcattttgaagccaagagggatcctcacacctcattttacaaagaaatatgcgagactgaggttggaaaggtcaaattcaaaagttttttttctctaaatgtccatgagaaggaaccttaatgatgtgtcctggctttggggagggacacgagccctggatctggaagaggatgacataggtttggagtgctacctttatcactcattaatggtgtggcattggggaagctctttgctggccagaacccctatttcctaatttataaaatcaggctcaccaagatacaaggctgccctaagaactaagtgaaaatacactcattttagaaatctatattttgattttttaaatgagtgtattttcacttagtctcttttaaatgagtatattttcacttagtctctgcctaatccacatcagtgtatgatcctggacagtttgtatgtgttctttttttagttggccgagtcagtggaatcagccttatttcacagatgaggtgacagaggctgaagggactgaaaagctgtgaaggtcatacagccagcagatgatgttgcagtcagggcccaggtccatggaacaacaaaaacctttccctcgttcccggacactagtgcagcacatggcagatgctccagaaataggaggaaatatacaaaataataagctatcaatgtaaatctccccagaaagctttgtaaaactcttaaaagcaatgtgggccaaataaaccattcccaaaggcctgtgtaagccataaagaaataagcaaagttactgatatttgaaggttgagacttattcagaaaatgtgttgaacccatctaaacataatctgctaaacattcattcattatctaacacaatagtttaaaaaaatcaaggttgggtttttatgagatgtgtgtatactgtaggggttctcttgtaattcatatggatgtatatttatccctgttttatggggtttaaaattattacagaagaggcgtatggtttttatatactgtgtttacattcggccatacctgtaaagatgccaaattcttcatcaaagctatagtgctcctctcccacattgctacattgtttttgtgggatgaatataatctacttcataataatccactttaaaatatgtttacattatgggggagaggaacatttcatagctttccttccatttcatagtgggtcatgccagctggggtggagaagtggggagtggggattgtcttgagctgattaatggttattattattatagatagtgtctcactatgttgcccaggctggtcttgaactcctggatcctgggctcaagggatccttctgcctcagcctcccaagtagctggaattacagggctatgccactgcaccttgattttgttttatatgatcccatggtttcaaagctagctccgttgttttcatcgaaagacagctagtgaagaaaaggagaagaatgtagcattttttaatataaggtatctccaagtggtaggatttttttaaaaaagataactggatatggtggctcacacctgtaatcccagcactttgggaggctgaggtgggaagatcacttgaggccaggagttccggaccagtctgggcaacatagcatgaccccatccctacaaaaagtgaaaaaattagccgggcgtggtggcacacacctttagtcccagcaacttgagaggctgagacaggaggatcacttgagccctggaggtcaaggctgtagtgggctgtgattgtgccactgcactccagcctgggtggcagagggagaccctgtctcaaaaaaagaaaaaagacaacatcaaaggaaatcagagagttacattatgggattaggtttctaagtcagtgcttgaagtgaaagttgcccttgaaaatcccacaggcacagaagggctcacgttcttaggaggcacatgggaactaagacaaaccaaagagcagcagatttgagtctcctgctttgtattgcagctggcgttggtgtttattgaggaatctgaaagatgcctacatgatttacgtctttgtctctacctttctttggcccacactggtacggctgtaatcccatgagtcacatctgggtgtggcgtgtgtgaccacatcctcccagccgtgcagtcctcctgctggaggcctggcatacagaagtagttttcaaaccatgttcctcagctgagggtcccaaggaaggtgaacagctgtggatttgtcacccactgccctcccttcctccccacctgtttatctcaagcaagggctcagtattctgggttcttgataagacgggtctgaaaactgtacagctgcttaaaacattttttttcttctttttgcaaagtttgaaaaccagtgaggtaaaccaaaactgctgggacttaccgctacctcttccctgactattggtgtggcttgggaaatgttactttatctttctggtttcagtctcttcgtttataaggtgcaggctttgagctagatactctcaatgtaagacacctctgttaagaatcagctacatcagagaactttctggaaacacccttggcagcattactgtggtttcaccagtgctgaattagaatgacagcatatacacctctcaacgttccctgagtgtgactgagatgaggaaatagagggaggagccattttctcttcagcctcttcactgctgaataaaatgagtaatgaccccttgccaaagggcactctctgctccaggggattctcttttctggaatgagattacttatttgcttaagatagttttattagaccaaaaataaataaaatttcttaacagttgactaacatttcctcaacaattgtgtttacctttttttttttttaatagaaacactcttttttaaaaaaattaccttgcattggtcttcttgtaggtgatttgaaaagaggctggactttatgatgcagagttttcaagagttaaattggctgagcccgaggaagaacattttgggttgcatttaaaatacttgttatttgatatcttaattaaaacatctgcagctactttcagaacagctaataagagatgttgacattggtagccaatgtcagattatatgttatggatgagcagtcctcacatgtctccgtttttatttttatgtctttcaaaatgcgcctctatcctcatcactcgccacctggccgccctcccacggaggcttctggaggcttccgttcaagggccttcccctcagccttgaccaatctgagcaagtgggagctgactgtatcaggagcgccctcttgaggacagacttgatgagggaaactaaagaagtttttccttcagttcagcattgcacgctgttacatctcagtgcaggggagaaagaatggatttcatgagacacaaaagttcattcattttttgtttttctgtcctttgtttccatcaggtcagccaccatccgcctatctctgcgtgtcatgctgagtctagaaattttgttttctggcaaggtaatgtgctaatacattttacttccatcatattgtgtaatatgttatctatttattttatccaagaattgctgtcaattcttactgagatcaaaagtggtccttggatttgggcctggttggaaggatctgcgccacctgttcttgcctctcatctctcacttagtttatctgagccacctccatttatttctgtaactttatcttatgtaaaaatcatttgaaatgcctcacatatttcaagagacattaaatatttacagttgtttatcagagtgtagacagcagaggggttttcagcttttgtcaaacttaaattttatttctgaagtcgtgttttacattgcttacttcttttcatttttgagatgattgttcctaaaattttgttcagtttatattttgagttgggggtgggtgggtaaatcttctaaagaataaataaggctatagatatttcctagatggattaattttgttaatctctcaatttattaaaaaaaagtgtactgtagaaggaacatataagcatcctaggtttttagacagtgagcacatatacattttaaaaatatttttctctgctactagtgatatcacacgttacctttacacacacaggcacacacacacacgcagtctattaaactttaaaagtacgaaacagtatactgtaacccccttccccagccactcagtttctctctttggaggcaatcagtatttccagtttaaagtgacaagtaccatggttttctttcttcacctttgctattaaagtttaaaattaaaactgctctctcaccaaaaccctctggaaatattctcataaggttcctagcctcctaattggtaaatctcactcatgctataagcacctcttctttgttttttcaaaagttggattttttttttttttttttgaaatggagtctcagtctgttgctaggctggagtgcagtggtgcgatctcggctcactgcaacctccgtctcccgtgttcaagtgattctcctgtctcagcctcccgagtagctgggactacaggcatgcgccactatgcccagctaatttttgtatttttagtagagatggggtttcaccatgttggccaggatggtcttgatctcttgaccttgtgatccgcctgcctcggcctcccaaaatgctgggattacaggcatgagccactgcgcccagccaaaagttggatttttttttaatgcgaggggtcttctcaaagtagttttgtgtgctcctgtgttacatccttcccttctcagccttagcatccttctcctaggccatacttccccatcagccttttcctgagcaatctacctatttccatgggcctaggattcccaaatcttgctttgtaacccagcctgacatttctctgccttttatgtaggttgtgtaaaccatttccgtttgttgtgattgtagatgtagctgggcttaaatctgccctcatgatgtttcttttctgtttgtcacatctgttctttgttctccgtttcctctttctctgccttttggattgaataatttctatcattctctttcatctcccctgttagcttattagctatacttacctgttttgtttcttgttaaagttgttactttaggatttatgttatatatttttaatatcatcaaataatattatgccagtttcatatagtgagatttacagaagtatacttccattttcccttcccaacctctctactattttttcatacgtcttctgtatatcataaaccatgtagtacattgttaatactttagctttaaacagccagctatcttttttttctcttggtaacaattttatgaacatataacttatataccatatcattcacccgtgtaaagtgtacaattcaatggtttttattcacagaattgtgaatttaataaactgtgcagttatcagcacagttaattttagaacattttcatcactccaaaaagaatcctctttagcaaatattatccaccccctctgccacctgccccatttctctcaatattccccagcctataaatgtgcctgtttggggcattttatataaataggattatacaatatgaggcccactgtgctcgctggtcccagacccacctctctcacctggaccccagccagggctccccactgtcccccctgcttcaaccctgatttccctgtgatctgtagatcctcagtgcagcagccagatgggatcctcttgctgttctttttctatttcctggcttctctgttggtaccaccattcattgcaagttagagaaatctgacattgttcataaattcgttctttttcagtctgtatctaacttgtcacctagttgacctagtgcctatttcttcttctttagtatttctgggctcactcacttccccgcgtctgttgtcttggttcccttcatcccgtttgttatcccctgggcaattgcagtagcctcttaacttgtcgccttgcttctcctctctcctactcctgttccattctccatatggcttccaattgcctttgcaaggtccatgtctaatcacatcagtggcctgattatttccactcagtgcacacaaaccagactcttagccaggcttggagagcccattgtttttcgttttcagttttgttttgttttttttggcagaatctcactccatcacccaggctggagtgcaatggcatgatcttggctcactgcaacctccacctcttgggttcctgcctcagcctcctgagcagctgggactacaggcacccaccacaatgcccagctaatttttgtatttttaatagagaaggggtttcgccatgttggctgtgctggtctcgaactcctgatctcaaatgatccacccacctctgcctcccaaagtgctaggattacaggcatgagccactgcacctggttttgttctcaacctttctactcttctctagataagacaatctgagacctataggacagaaccacactatttgactgtgttttcctatacttccgtcccctcagacaagctatttatttggccttaaattgctttttctctgcccagtgaactcctgcttattcctcaaagccccatttagatggccctttctgacaagcctcttctgatgctttctccaagcatattcgtcactccttcttctcaggtttcattttaccttataacacactcagttatagcctgggcctctctgtgtgcttactacttgttttcacttctcgcattcatggaaaggactttatcttatcattttagtttccctgattctgctccaagggcccatatggggttggtacttatattttatgaaaagttatcctatacaataattgacttgattgtgaagaggttgtactatatagcgattgatcatttatctagcctaggaactatttcatctacctacctctcctgctaaaaatgtaatatttggtatttcatttcagatgtgagatggaaaaacaaattctggggcaaatccatggaaattgttccaattggcacaacccatgtgactctgccagtgtaagttcttcttctgtggttaaggagctttatggaatttagggccaagattttgctttggggacaggatgcccacccccgcccccggcagttgcattgagtgtgtattttttcttttaatctgtctgacagtaggtttaaatgttcctccttttggcaagctcacttttaaaaaatgtttctccctcaaatggaaatgcctcctggagaccaaagttccctgaatagatgcttattaaaaactcatttccacttcctaacaagattaagaatggtggttttagctgggcgcagtggctcacatctgtaatcccagcactttgggaggccaaggcgggcagattgcttaagtccaggagtttgagaccagtatgggcaacatgacaagaccctgtctctagaaaaaatacaaaaattagccaggcatagtggtggcacgcacctgtagtcccagctactcaggaggctgaggtgggaggatcatttgagcctggggaggttgaggctacagtgagctgtgatcgtgccactgcactccagcctgggtgaaggggtgagaccctatctcaatttttttaaaaaaagtgtttttcctttattatgctgctttgctatcaaaatcccttttaagaaaagtatggccttgatctgatagggatgattgatacttatttataaagcaagatgcttctgagcagggactctgaaactggactgccgagattcacctgctcactctggcacttactaacagcgaatccctgggcaagttacttcacctttctcatcaccagtttccccatctagaaaaagagaataataaaccacctacttcctagggctattgtgaagattaaacagataatatacatgaaacacctaaaatagtacttagcacattgcatatgttttgtaagtatctggtcttattattaataccattttcctcgtaattattgaattccataagtaatatctgaatactttctcatcacaaaggatgcaggcaatgtatgtttagcagattgtataaaaccttcatccctttctcaagcttccctttcctagttcagcaacattagacaagcccctctggctctgaattgcctcctctgtcaaaggagggagtgggctgttccaagagaccaccagcttctagtgaagcctctggtagcttccagagtgcaaagtctgaatgctgtcattctctgtggcatgcatgcctccttggagagtggaagctcctagaacatccagtgtgacatagacacttagccagtgttgcttctgtgaataaagagatgaataatgcattgcatgacttattttataaaagagcagagtttgtttgcatttgctgctggctcttctagaaattggtacttctactttttccttctttttagttttggggatcattttgagtggaacaaagtgacctcttgcatccataacatcttaagcgggcagaggtggattgagcactatggagagattgtcatcaagaacctgcatgatgattcctgctactgcaaagtgaattttataaaggtaactccagtgactctctgagctctgaccctggaagggctgtggcagagccagggccccagagcacagggcatttgagagatttttcgccttcacctttatgccagcaggcaagcaatgcctgagctccttggtcccagctgcacctctgtcacctagaccagggcaatggcccctcctggcctcttactcccctaaggtctgtcctccatacagcagccagagagacccttttaaaacataaatcactgtgctgcagtatgtatgcaccttgacagcattatgttgagtgaaataagtcagccccaaaaggacgaatattacatgattccacttctgcgagatcgccagaggaatccagttcacagagaaagaaagcagaatggtggtcgcccggggctgcaggagggaggaagggggaattagtgttgaatgggtatagaacttcagtttgggaagatgaaaaagttctagaaatagatagtggtgatggttgcacagcattgtgaatgtatttaatgccactgaatggacccttagaaatagttaaaatggtcaatgttacattaggtatggtttaccagactttttttttttttaatgtcatgctgtatcattcctttgagcaaaatcccccaacagcttccatctttctcagagttgaagcctgcatccttatggtggcctgtcgggcgctgcacaggctgtactccccatctccaccctttcacacacatacttgcacacttgcagatacacccatacacacacgccacctcgttcctctccaacctgaacttctctttttcctccctctttttccccactgtcctctggccacactggccttctttctctttcttcatttccttctgcttgggcagctgtccccagatccttccatcaccagccccatcctgtcattcactccctatcctgtcccattttcttcagagttcttatcaccgtctgaagtcagcctgctcatcgttgctgtgtgtgtttattttctgctctccataccctcctcatcatccttgactccagaaaagcaaaacctagtctatcttgctcacttctgtagccctgattcctgcaatggtgtctggcacacatgagagactcataaacattcagagaataaatggaaaaattggccagaggcaaaaagtatggaatggtctctcattttaacagccttgctggcggccctccctgctttctctccctcctagattccttcttgctcttaaaaattgtatgtagttaaaacagctttaaaacatgaccctcctcaaggaatattggcatttaacaaagatcgaaataataagcagagagatgaggttttattgtggaacttcatgcaatgcctctctgcaccacctgtaacctatagggaatacttaggaagaggtggattggggtctttattatagcctcaaactggattatagacagacataaagcccataatgaccttacatgtgggacaaaataaaaatgaccctaccttgaaagctttgtctaagctctctgcaaacagaaacaaaaggcaacctgaagcagggatatgttacccgtgacccaggtgaaagccacgttgctctcaacattttctgcaaggaaacatgctccactcccatatctaccacctaccttgttctcattcacttacatgcagaaaatgggtgtatagtcatgagagatgaacactgggcatgtctggtgttgaaagagatgctgcaagtggatgccacactcgcctgtggaaggtgacagtgtcccttggtggcttccagcaaattctcagcactggatttgttggcagatatctctaagggaaaatctgacacctgcttcagaataaacttaagagcccgggtgccatggctcacacctgtaatcccagcactttgggaggctgaagcaggaggctcacttgaggcctgaaatttgagaccagcctgggcaatctgacaagaccctatctctacaacaaatttaaaaattagccagacacggtggcatgcacctgtagtcccagctgctggagaggctgaggcagaaggagcacttgagctcagaaatttgagactgcagtgagctatgattgcaccactgcactctactctggggaacagaataagaccctgtatcatcaaaaaataaataaatcaacttaagagtctcaatagtcttttttttctttttgcttttccttcattcttacatggctggagagctcaactttaaatttctaattcaggtctgagacacttccgtgccccaccatttttaccacagccttgaaatgcggaagctgaactaccagaatctgacctgaaaatgccattcaacatgattagtttccaagtatggactctgtttaagctgaaaatagtactagggttttttgatttatggagaaatgcctttgccattctttcatagagatttttagggcagccaggtaatttgaaaaacaaaaaacaaacaaaaaaaaccaactctagggtgctagagctccctctgctggctgcagtgtggaactgtataaaatcctctgggctggactggcctgagctgggctggactggcctgagctgagctgaactgagcagaatagagtgcaaggttgcctcgcagacctggaccaatacatagtgagaatacccacactactcgcttgatatatagaaactgaaccttttcttttcttgttcttgttctttttttttttttttttttgagatggagtctcaatctcacccactctgaagtgcagtggtgcaatctcagctcacagcaacttccgcctcccgggttcaagtgattctcgtgcctcagcctcccaagtagctgggattacaggtgcccactaccacagccagctaatttttgtatttttagtagagatggggtttcaccatgttggacaggctggtctcgaactccggacctcaagtgatccacccacctcggcctcccaaagtgctgggattacaggcatcaggcactgcacccgtccaagaactgagccttctcttacattgtatgtagcaaaggtagaaatacaaatgtatcttacacaaatattagttgagttacaaactgcagatagttaaccattcatttttattaaataactaaaggtatgagttttttaaagccaaaatccaagcataaaaacagatacatagaccaatggaacagaatagagagctcagaagtaaatccatgcatttataattaattggtttttgacaaagtgccaagaactcacaatggggaaaggacagtctcttcaataaatggtgttggaaaacctggatatccacatgctgaagaatgaaattagaactttatactgtagacaaaaaccagctcaaaaggactaaagacttacagcaagacctgaaactgtagaactactcaaacaaaaacataaggggaaaagcttcatgacgttggtcagggcagttattatttttggatatgaccccaaaagcacagacaacaaaagcaaacatagacaaatgggattatatcaaactaaacagcaaaggaaacaatcaatacagtaaagaaacaatctgtagaataggagaaaatatttgtaaactatacatccgataagaggttaatataaaaaatgaatagagagttcaatagcaagaaaacaatcagatttaaaaatgaacaaaggacctgaagagatgtttctcaaaagaagacatacaagtggccaatagatatatgaggaaaaaatgatgaacatcagtaatcatcagggaaatgcaaattgaaaccacaatgagatatcacctcatatctgttagaatggctattatcaaaaagatgaaaaataatgtgttcaggaggatatggagaagaggaaacacaccatttgtggaaatgtaaattagcacagctattatggaaaacagaatggaagttcctaaaaacaattagaaatggaattaccatatgatctgccaatcccactactgggtgtatatccataggaaatgaaatcagtatgtcaaagagatacctgcatctccatgttcattgcagcactattcataatggccaagatagggaaacagcctaagtgtccaacaatggatgaatggataaagaaaatgtggtacatattaacacaatggaatattgttcagcctttaaaaagaaggaaaccctgtcatttgtgacaacatagatgaacctggaggataagtgacataaaccagacacagacagatgctacataatcttacttatatttggaatctaaaagagttgatctcatagaagcagagggtgggacaatggttgatatgggtttgccaggggtggaggggaggattgggaaatgctggccaaaggatccaaaatttcagacaggaagaattagttcaagaaatctatcgtacaacatgatgactataattaataactgtgttgtatacttgaaaattgctgagagagtttttgtttttgtttttgttttgttttgttttgtttttgagacggagcttcactcttgttgcctaggctggagtgcaatggcgcgaccttggcttaccacatcctccgcctcccgggttcaagcgattctcctgcctcagcctcccgagtagctgggattacaggcatgcgctaccacacccggctaattttgtatttttagtagagatggagtttctccatgttggtcaggctggtcttgaactcccgaccttaggtgatctgcctgccttggtctccaaagtgctgggattacaggcgtgagccaccgtgcccggccactgagagagttaagtgttatcataagtaagtatgtaaggtaatacatatgttaatcagcttgatttagccattccacaatgtatacatgtttcaagacactatgttgtacatgataaatatataaattttttatttgtcggttaaaaaaacggaacccagaactagcaaactaatatgcagtatggagccactcttacagtcctttctctagcttttccttttttctttccttaatatctgtaataagctgatgctaaaggactaagccaacaactcatttgaatcctaggcaaaatactggagcactaatgcccatgagattgaaggcacagtgtttgacaggagtggaaaagcggttcatcggctgtttgggaaatggcatgaaagcatctactgtggcggcggctcctcttctgcctgtgtatggagagcaagtgagtgtctgggtttgtggaccccaggctgtgagtgggtggatgggtgggcatgacacaagaagccacagaggacaggagtagtgtctgttcagcatctccagcctcttctgctttgaactaggttagaggtgtaggccctctttccttcatccagtcttcacctcccctgtcatgcttacttacagcaacacctctgctgggctgctgggtcccgggttcttaaccccagaacaagcattgctaatccatgggcactctctgagggaatctggcagtccacatgcataactctactgggtactataaaagagtatcagtgaaatgcaagaagtcattctacagcaaggacaaagaggaaagtgttcctggaaaagcagtgacccaggagacctacaaatgttaactatccccaggctgacctaaccccaaaagccatcctcatcactcctgtgattccagaagggtgctgagctcttggagcagatatgggcagaagagctagggaaccccagctttcatcagcatgtccccaccatactttaacatcttattccatctcctaagtccgaaaattatgttgtttccaagtcacagccatattgtaaaccattgttctgagatataactgttaggatgcttcaggctggtaaaaaaccaaacagaaaaccatttgactggtggtttaaaccgttaggctgtgtgctattacacaacagtaagtgagtggggggggtggctccagggttgttacataggcaatttacctgtgtcaaggacacacagatcagtgaggatacattctgctactcccagtgtgccgtggtgtttcccctaatgaatgcaaaatggttgttaccattcagtgtcatacccctgcatgacagcataccaagcatgtaatgagaggacaaaagagctttcctctctcgtgcctctcttttctcaggaacatttcctaagatcccgcagcaaatgggactttatatcacgtcagcctgcagtgggttcagacccatccgtgaaccagtcacgggcaacagagtaggcaagagagatttagatgtcttggattaatccccagtaagggcacaatgccatttgaacagaatcagtattctgttagcaagcaagaaagagaaatgatggtcaagtaggcagccagcagtggccctttcaatgggtagctgccacatctcccactgttgcagaggttgccgtgaagttagaatgaattggcaccagtggaagccttcctagcttcagaggcaagcatgagattttgcaaatggcacagtctgtctcctttgcttaaagtatgcatcacagatgagaactgcgatcctgtctcagtgttaaagtaccaccttgataaagcaacactgtttaaatttttgttactgtcattattccttgactttatgtctctctaatggcagtgagcatccctggcccatctttaagaaaaagcactatcttcactccctggttactggggagctgaccaagacaccataggaaactttgctactatttttatgcttaggatacacagagaattagactagttacaaggaggacttacgaagattcaaaaaatgggtcccagtcgggcatggtggctcacgcctgtaatcccagcactttgggaagccaaggcaggcagattgtttaaggccaggagttcaagactgctctggacaacatggcaaaatctcatctctactaaaaatacaaagattagccaggcatggtggtgtgcatctactgtagtcccagctactcaggagggtgaggcatgagaatcacttaaaccctggaagtagaggttgcagtgagctgagatcgtgtcactgtcctccagcctgggtggacagagtgagaccctttcaataaaaaaaaagggggggtctgcagaagagttactggcaagcatttctcttgttatgtgtgaagagcttaggctgtaagtagatcttagtagtctacattggatttatacaatatgtaaatttgggtatgtttagcttttttggaattccagttagggcaatgcacctaatgttttaaagatgtaagattgaggagaggcaagaattggtaaaaagggtaggaatggaagaaaagaataacatttattaaccacttgctctgtgttcagcactgttctaggtactaaacagagtttcaagagaatttgacatcacttaaatcaaaaacagattctctagagtgagaatcaggaaaaatggacccagagctgatattagtatgtttatttattgttgttattattattattattattatttttgagatggagtttcgctcttgtcgcccaggctggaatgcagtggcgtgatcttggctcactgcaacctccgcctcccaggttcaagtcactctcctgcctcagcctcccaagtagctggaattacaggcgcccgagaccatgcctggctaagttttgtatttttagtagagatggtgtttcgccatgttggccaggctggtctcgaactcctgacctcaggtgatccgcctgcctcagcctcccaaagtgctgggattacaggcatgagccaccacgcccagccgagcatgtttattttaaaatcaaattattttcatagcttaagcactacagaaacttcacagcattgtataaatttgctttctgaccacacataggaggccacatccctgtaggcagaagaaaaattatagagaagaaaatttatagagaaatgttcagtgcctgttcattagtcagaatattttaacagaaatggaagggagctgagagagaaaaattgtagctaggctgagacgaaaaaggtgaaggaattaaaatgtaacataagtaacatgcaagttaggggtgaatgatttattttcttcttagatcctatgccgaaaggctacgagcaatactatagcttcacacagtttgcgctggaattaaatgaaatggatccatcatcaaagtctttattgccacctactgacactcgatttaggccagaccagaggtaaggattttttaaagatttttctctccagagatgtaaaaccctttacaaaaagtcttattaacaatccttaggccaccagaggcacctgagaaaggtggaaaatgtcatcaggaattgagaggtggggatgctttaaacaattgtatcacggaggagatggggcccaactaggatccatgtgtggcatggcctttattatctgtaaagccccatttgcattgaaatgccaaaaaaggtgtttattttgaagagttttactgcatgcagtaataaagaacttagtgtaaagtaagtaagttaaaacctccagctccccgagccctcaaatttaaatgattttggtgcactgagatctaactgctgattctaggttgctgctcacaaggtgtgtgatatatggtaggtcttttcatctttcctggcctcagtttcctactctgtaaaatggaaataagaatgtctcccctaaggcctttctaattaagactcaaaatctagaagcccaaggaaagaaaagattgttacatttggctttattaaaaacaaacaacactttgggaggccgaagcgggcggatcacttgaagtcaggagttcaagaccagcctggccaatatggcgaaaccccgtctgtactaaaaatacaaaaattagccaggcgtggtggcacatgcccgtagtcccaactacttgggaggctgaggcacgagaattgcttgaacccaagaggaggaggttgcagtgagccgagaccacgccattgctctccagcctgagtgtctcagtgagaactcacacccccacaaaacaaacaaacttaagcccttctttatggcaaaataaataaaactatatatataaggtcaaaagataaatgacaaacggagaagtccgtatctgcaactcatgtcatgaattgcctctagaaatctagtaacagatcaacccattagaaaaaatggacatagggaggtaaattcattttgcagggattgaacactgttgttagcaaatgcctaaaagagatgtgaaacagtttacgtatgtcagctgtaacagttggtcccaaatgggcccattcccctaatttattttaaagaaagccatacatagaatgcttcaagctatcttgctatgcacattatgcttgtactgtttcgtgcagtttgtctacttttttagggaagtattttttgtataaagtctgttacaattgtgtttcttaaatcaagcctaagaatggagttaattggaaatatacagtatatattaataacgtatgtggtgtttaaagaatggcaagcattgttaatttctgtgatgaacattttcaattaaatttatcttaagtttgtgttaaaaaaaatggacataggaaaatgaacagtccacaaaataggaaatgcagatatcccttaagcatgtgaaaagatgctcagccttaatcataataagaaaaatgcaaatttaaaaatcatgtcgacatcccaatttttaacctatcagattggcaaaaattcagaagttttatacactttgaggttatgggagaaaagggcactctcagcattgctgatgggaatataaattgggtatgatccccataaagggcagttcagtaatatataaattacacactcaccctttcatccagcaatttcacttctagaaatttctcctacagatttttcctacttactcatgtaaaatgatggatatacaaggtcatttattgcggcattgtcacattaaaatgattcaaatgattcaaatgtctatccataggaaattgtctaaattcatatacatccacgcaactggatattatgtggctattaaaaaatgaagatgtatgtacatccatggaaagatctgtaagatatattgttaaataaaaaataaaccaaaaccaaaaatcaagggatacatagcatgctaccatttatattttttaaacggagggagggataagaatatgtgttaatatttgtttatatacacatgaagaatctctagaaggatgcagaggaaactaataaagtgggttttctagggtgggagggtgaaggtggctggaattagagacaaggaagaaaggaagactttgccccaaattcttttttgtagatataatttttgaattatgtaaatatcaccaattcaaaaaaatatcttctctgactacttcaagatacggattaaacggttggggcggggtcttacgtataggagaggattttgaatatccagtcgtggacacatgcaagttgagtagtaatgattgttttgttttcttgaattcatatcctttcatttttttttcctccatgcctcaggtttctagaggaagggaacttagaagaagctgaaatacaaaagcagaggattgaacaactgcagagagaaaggcggcgggtcttagaagaaaatcatgtggagcaccagcctcggtttttcaggttcgtgcctggattgagtaggtttttggttgataggtggtgccagcacgttatgcttctggtttgcagaaagtgaacagtactgtccccagataagagcattctccaggcttttcctgcttccacgtgggggtactgctcctctgtgccaggccctgtcccccgcacttaccttcaggctctccctcttgctgacttcagacaggactagggcctgcatttttgcattccttgagcttttccagtgccctcagccagtgagtttgcagaggagctcctcagtcagggagcctgccagaactgggtcccagcaccaggccagcttattaaatccacagctaaggttggtcacccccataggcatgttttacaccatgacagagatcattcacgatcactccacagttaagcagtatggaaattccaagcagtctgtttcttgcattgtagaagttccagtacacttgggcttacatttactgttatctttaaaataacttgccaagaaggtcttgttaaaatagatataattttttttttttctgatacagagtctcgctctgtcacccaggctggagtgcagtggcaccatcttgactcactgcagcctccacctcctgggttcaagcgattctcctgcctcagcctcctaagtagctgggactacaggcgcgtgccaccatgcccggctaatttttgtatttttagtagagacggggtttcaccttgttggccaggatggtctcaatctcctgacctcgtgatccacctgcctcagcctcccaaagtacaggtaagagccaccgtgcccagccaatagatataaatttttaaaggaggtatgagagatcttcaacccttcacctccccatctcctcctataactgagtagaagagaaagctcaaggcaggtgggggatctgttgaaggactcggtataataccctggaatggggcctgactctcctcactaccaggccagggcctatatgattttagtttttctgttttctttttttaaaaaacttaaataggtgtatgtgaaaaagcagcaagttcctgctctactccatctgcccaagtccttccagggccaccagtgtcttttcattgttttgggatgttttttgtttgtgtttttgtttgtttttagtggacaacagaagtacttttaggatttagttattaataacagcagcagtaataaaatctgtattccaaaacatcaaaatagtgacaaataaggttttgtcttgaagaatatgatgctcttttccctaaagttgatgtagattctactagatcccttctgatcatttccacaaattcaagatattagtgatggaaaatcaactggccaaaatttcatcctgaaatattcaagcttcatttaaacgtttaaagaataagatggaaatgttacattcttttttgaaaaaggcaagaaatagaaaaatggatagattaacagactgatcagttgatttactgatcagttaatagataaacacattacacccttaagtaggttggttctttttcttccatacattgtctattttcattttttaaaaaaagaaaaatgtacaattatgaagatgttcattacagtactttttaggatcattaaaaatggtaggtaaccaaactgtctcaaggactagttaaggagattcaccaactcgatccaacatgaggcattaaggatgaccttacgaagcctgtggagctctgctggaaacacattaccatgtaaatgcaagatacagaatgtgattatgctgtcattgcaatcaggaaggaattgtgtctggaatgaaaaaggacggaaagctgcttcagctggggcggccattgctctttttctttttgactgtctgtaaaatgatcatagtattagatgggaaaatttttttcaattggagaaagagcgagagttgttcagcagtagcagtcctccttgggactgttcaaattagaaacctggcaaagagattttggagaggaatatggggacttggatgttgtcattaacacttactgaggaacagcaacaaaatcactgaaaattctaagtggaagctggagctcagaccaaattgagcctctttgttttaaaatagtgaactgtctgatacacagattgactcatttttaaacatatagtgttactggaatagggaaacaagtgtgataaaaatctacattcctgagagtgtaggaaaacaggcacactccacttttgcttctaaaccatatggtaatatcagtcagaatcacaaatgcacatactctttgacccagccatgctaattacaggaattgttaatgtaaccgtactcacacacatacaaaataacatgccgagctagagtttagaaataacctaagtacccatcagtggggtacctattaagtaaattgtggtccatccatacaatggaatatcatacaactgtataaaaagaaaatgaggaatcccttattgctagagtcaccaaacttttcctataaagagcaaatgataagattgttggttttgcaggccatcaggttcaattcattcagtagctattatgcagccccgctgttcagcattgaaagcagccataaacagtatttaaacaaatggacatggccatgttccaataaaacagtatttcagagatacgcagaaggctggattcgacccttgggccatagtttgctgacccttaccttattgtactaatcggaaatgatctccaatatgtttcattatgtcaaagctgaaagggtagaacagtgtctggtacaacattatgtcagaatgagagggaatagagtgtgtgttcacacacacacacacggaatttccctgaaagaatgaagctgataacatcactacctctgaggagaagaatcaggaggctggcagagagggggaagataaaaacttgaagctgtatacccttttgcgccctttgaatttggtctgtgtcatatattctctattcaaagaatagaaaatcaggactaatctctccagactcttatggctttcaattacttttttttttttttttttttttgagaaggagtcttgctctgtcttccaggctggagtgcagtgccgtgatcctagctctctgctgcaacctctgccttccagttccaagcgattctcctgcctcggcctcttgagtagctgggattacgggtgcccgccaccatgcccggctaatttttgtatatttagtaggcacggagttttgccatgttggccaagctggtcttgaactcctgacctcgtgatgtgcccgcttcggcctcccaaagtaccgagattacaggcgtgagccaccacacccggcctcctttaaaaaaaaaaaaaaaaagttaaccacttcctatgtacaacctggttgatgtgtagcttttgtgcagtcattcccaaggtgctgacagtcatgcaagttatgttttgtatatgacagactctccccacatcctcctcctctcagaagcaccacttttcatagcctctaagtttgagaagttaaagtcgtgtaacaaaatgggccagcgtggtggctcatgcctgtaatcccagcactttgggagtccgaagtgggtggatcacctgaggtcaggagttctagaccagcctagccaacatggtgaaaccccgtctctactaaaaatacaaaaattagtcgggcatggttgcacatggctgtagtcccagctactcgggaggctgaggcaggagaatcgattgaacctgggaagcagaggttgcagtgagccaagatcatgccactacactccagcctggatgacagagcgagcctccatctcaaaaaaaaaaaaaaaaaaaaagtaacaaaattatttctggacatctaattcccagaattcccggtcccaacactctgggacgctgaatgcatgtgggaatgaggatggggaaagcagggaggttaggaaggaaagagacttgagaatgtgacgctggtttcaagagtctgcaagaaattgtttcttctttcacaggaaatccgacgatgactcttgggtgagcaacggcacctatttggaacttagaaaagatcttggtttttccaaactggaccatcctgtcttatggtgaaaaagtaaagaagaaagataacattagtgtatttctcctgtgcttgccttctgaagtggcacaaacctgtgtttatatatttaaaagatactctaggatgatcacttgtgcttagcttagcattgtaactctttaagtctatattttcctcagtgcgtttctttacaatttcaaatgttaccctgattgtttatatgaatgtagaacaccttgacatttctttttatatataaactatttaataaaaatgaaagattgaatgttcatgtgtgggttaaaaaaagaagctttaacactaattttccaaaggttagggaagattccaattaaatttatgccttataaaattatgttgtagaaaaaaaatcaacctctcccaggtgcattaagaaataagaattcccagggttactcacccatgcgtaagctacccaagtttaatttggtagctgaaatatctttttgcctcagacagctcttgaattgctcatacagaacaattctgctggtgctggagtctgaagaatattttcatttgcattttagtggttagggagaggatataagattaatggaatgtatatttttatataagacgtatacggcaccttcttgaaaaggaagcatttgaacttgttcctccctatagttctattgccttatatgcaaaattgtaccctgttgctcagagaaattattcataagagaaaagaattccaattaattaaatatcacaatagcatcccagagagacagtaggaaatttctccttagtgagagctgagtccttgagaagttaagagactgtttcctgcttcccaccccaccccgttttttgtccctccgtttgatcacctccctgttgagtatggaatgtcccagtttaatataaaacatacagtttattccacacagcagtttgactttgtaaaagtttagcaaaataactgattgttttggataactcaacatgtttttcttaaatgctgttttagtattttctacctcttaataagcaccatattttagatcttgtataaaaagttgccatctgccttatagacaaatgtagagaattgatgttcttgctttgtgttgtgttctggtaaagctttaagtgagtgtcttacccctttcctatactttcttgttatccatatcattcttttgtgagttttgcagcagtcttgaataatacagattataactactgaaaggggaaccttcgtctttttaaatgtgttatttcacattacaataatatgtgtagtagttgaattgtgttatcaaagcatgtccaacttctgtccagatgacattaaaaccaaagcctaattgttaagcctcttattctaaagtccatagcaatgctatggaatatcaagtataatgatgtagtaaaaagatttctccagaaaacactttgagatacttaaagaaattcagagcatatcgaatgttatgaatgaagagtaaaataattacaggaaaagaatgcatgatttttcattgtcacaccaaataaccagttggacaatattgcattttcaaaatggagagttatttaaagtggatgtgtagccttctggaatctgcacgtgactggcattttaaaacaactcattaaatattggattcattttatcgagatgccaagatgaacacaatgtgaatatcatttccatttctaagcagttgaatgacacagtcagattctttggtgtatgctttgttctttccatctcaagcatttatccaaattctgctcacagacatgaggaagcaggctgtagatttaagggcactcaaggggaaaacaaatgtagtttccacagtgtgaggataaatgtagaatcgtggtaatattggctgttaaattggcctgctccagagactggctcaaaaaagaaagaagcaacgaaaacaaaatgcacagcctgaatggacgtagcactgtcatgtggcatttggaaaatctttaattatcctaatgttatttcacttgcccttatgctttattttagagtcccagggacaactggatgaaacattacgtctgtagtcatcttatttgagatgggggtgggaacgaattaaaatatgatagagaactatatgcagattttaaaatctagtcagtactagcatctataaagggcttttctgaaatttaaacagcttggtgatgcatcctgatattataagcttaaaactatcttgagggggaaatgacttcttttctccttctgtcccttttctcaaaagcatctttcccccaaatgtatgtctctaggacattttatagttttaagaggaagaaaacagaaacgtggcatcatttgggaagaaccaaggtagaatttaattttctggactttaaatctcctggttaaataatgctaatcactgtaccatttgagttacatgttttaacctcttttttttttctaattattccatccaaaatttctggtgaattacacagaaatttttggaaatgggactttgtgcaggtaaccaccctgcacttcaggtaatgttcctgtcacagctgtcgactaccccacgctgcaggaaatccattcagaaatgagctaacagtctccagtgtagcaggagagccagtcacttccctccccaggccccaaagcaccccaaggctggtattccttgagtcataggtattaataataaaagcctcaatgcagcttctccatgtagttcctctcctacaagccaggtggattctggtcctaactaaagagatgggagttcacctgagggcaagaagtacccaggatgcccaaacagccgcacaggtgtcctgtgcttcctgtgagacttcctgggggaaatatacaaactaatatattttttaatgtttacgtcatttacactgctgcttttctcatattctgcttttaattacttgtagtaaatcatttgtttgggcttcaagcactgtcttccatctgcatcttccagatttatcatgagtgatcttgttctactgttaaagatgtcaagcctaaaaagtaataaagtttttatttggctgttgaaccttgatgtagcccctactacatacactacaagttatgccttctggctactacagaatctccgcagaccttttagttatgagtagaagcaataagaaggtgtccttatggtcttaggaataatagttccaatgtattggcataatttgtttgaatgtctttattttgatattaacaccggcataaatctatttttgctaccagatgatagctattttcatttgctctattttcctctgcattgtactaatctgttactcagtgttagtcttcatttttctgtgttggaaacctgcgtcatgtaaatatctgcaaatcatgacagtctaaagtgcaaaccattttcagagactttggggaatgcagtgatcagaagtggctaatttattttatttctgattattttatccagagggtacttttttaatggatatttgtaaatcttccacttaaccactgaaaattattttgttttaatcccacccttccatccatacctctgcctccccaaaaagctcctattaatttgcttatccccctcatgtagctagttgaatgtgaataaataacatggaaaaaaaggccacttttgtctttgtttttccaggttaatgggaaggttatttggctgctaaaagggaacagaacaggacccatgcctgaactctttcaaggaggaacacaccaggttactggaagtgatgggggttggagataagaatactctgggacacaaaacacttggaaaccatcgagtcaccataccttttcccctaacatttccaaggcacgccacaattgtagaaccccctcagcccttggaagagagaactgaggcaactggagccccagacaggacacctccagccccaggagcccctctgtcgattccagtgtgctatgaaaatattacggttgattcttgaacaacacaggggctaggggtgccaatgccccatgcagttaaaatccacacagaatttttgactcccccagatcttacctactaatagcccactgttgaccagaagccttcccaacaacacagataattaacacatctgttgtatcatatatgtaatatagactgtattcttataataaacctagagaaaagcaaatgttacgaagaaaaacattaggaagagaaaatacatatactgttattaagtggaagtgggtcacaataaaggtctttgtcttcatcgtcttcacgttaagcaggctgaggagaaggaagaggaggggtcgctcttgctatttcggggtggcacaggcaggaggaaatctgagtataattgaacccacacagctcaaatctgtgttgttcataagggaggagaccacccctcgtattgtcttatgcccaatttctgcctccaaaggaagaagtaaaaactaaaaggcagaaatgaaatccacaggcagatagccgggggcataccctgggcctggtagttaaagatcaacccctgacctaactgcttgtgttatctatagattccagacattgtacgggaaagcattgtgaaaatccctgtcctgttatgttccgttctgataccggtgcatgcagcccccagtcacgtacccctgcttgctcaatgggtcacaaccctctcacgcagacccccttagttgtaaagggacaggaattgttcactcggggagctcggttttgtaagtctgccgatgctcctggcagaataaagccctttccttcctcaactcggtgtctgaggggttttgtctgcagctagtcctgctacatttcttggttccctgacctggaagcgaggtgattaccgggcggtggaggcaactgcttaggaggcttaggcctgccttgtggaacatccctgcgggggactcctgccggctttagtgaatcctgagagtgctttcagctgggtaattgccctggtggaacgcctcgccagagcagcgcacggtaggcccccgcggaggattaacgcagcggctgaacagcgggaaggaatcggcgcttggagtccagacatctggaacacggtaagactggtcttggaacttgcccactccatctgagtggaagcgtggcctgatcacccacggcatgcctttattggcaccttggttttggttttgattttgactggatttgcactgttttggtttagatttcggtattgacttctggatttgaactgttttggctttgatttcggttctgacttggctcaaattgcttgatgaatgagtaactccttatccatactttggttttagtgtgaattgctgggggagtgagtgactttttgcccctttttgccttccctctttgtggtaagagtgttgttttgtctcctgagagaggagaatgggtaaaacacaaagtaagcctaccccattaggaactatgttaaagaatttcaagaaaggattcagtggggtctatggaatcgctatgacacctggaaagtttaaggctctgtgtgagatagattggcgggcattagaggtgggatggccatcagaaagaagcctagacaggtctctagtttcaaaggtatggcacaaagtaactggtaaatcaggacacccagatcagtttccatacatagatacgtggttgcagctggttttagaccccccacggtggttaagaagacaggcagcagtagtactagtgacaaagggacagatagccaaggaagaaagagtagctctactcccgccggtctctcccctaggggaagaggaaggagacaggagaacagcagcataagcggctggcagaggcaaggaaagaccagcagagagaaaagggagagagagagaggagagaaagagagagagaggaaagagagagagagaagaaaagaggcaaagagagaaagcaagagagacaggaagagacaaagaggaagtcaaagagaaagaggcagagagagagaggaagagacagagacagaaggaagtcaaagagagaaagagagagatatacaagtagttaagaaaaaaacagtgtacactattcctttaaaagccaaggtaaatttagaacctataattgataattaaaggtcttctccgtgatcatataacactccaataccactttgttgtcagtgtaaacaagggcgtagcccgaaagcactgagaccactgacaacccgtagccttcctatcaaaattccttaacccagtaacccgtggatggcccaaatacattcaatctgtagtggcaacagctttgctaacagaaaaaaagtagaaaaataacttttaaaggaaacctcactgtgagcacacctcaccagttcagaactatcctaagttaaaaaaaaaaagaaagaaaaggggggtagaatttatgtaaaaagaacgttatatattacattcttgtcctaaaataaattaactggttgtttaaagaaagggatgtttgcaataagtcagaaagttgagacatgttgaagaattgtctgtgaaagtcgtgaaacaagaaaaaaaatgtgtgttataaaaaaggaatttatgcaagaaatgttgtataatttaaaagtaattaggcctcctgaatgtaaaactgttgaaggaacagtttatatgcaaagtgtgtaagaaaagtaaaatatatttttagtaaaaggattataaggaggcataaaaatgtagatttttacctacattaaaaggtttttaaaaattttgttttgaagatttaagcaagttttaaaatgttaactgtaaagaaaattctgtgtataaacatattagctaaagttaaaggggtatcatccagtttttctgtgaactggacattaaagtaaaaacaccacgggtttttcttaaagcactaacctgctcttttacaaaaattataaaaggttgaagagagtctataaaaaatcttaccttatggtcagacattaaaaattgaataaatatgtctacaaagttttattaaaactaagtgtaacattaataacacactaatataaaggtgaaatttagcttatctggtataaaagtgatacaggaagcattgtcaaatataaaatggtgtttggctttctttggtctaaaaactaataaaaataggtgcaaaaggaaatttctcagtaagaaggcaccaaggtactataaaatctgctgctgatgtcccacatttaaaacaaaaggtcagtttcttagaaattatatacttggtttatcttccactttcctttccctcaaaactaaaagtcttttagcacatgtactacccttagaatttctggtaaaccagcaccagcctgaaaattacgttcttatcaaagggtggaaaaaagaaaaacttgagccagcctgggaaggaccctaccttgcgctgctaaccaccgagactgctgtttgtacagcaaaaaagggatggactcatcacacccgagtcaagaaagcaccacctgctccagagttgtgggccatagtcccaggggaaaaccctaccaaactaaagctaagaaaaatttaactctttcatctattctattactctttcttctttcctggctctattgctgaccatctagttattaacataaccaagtcaatttcgcctcaaacttgcatttaatgcttgccttgttataccttgtggggacttgccaagtcaaagacagacctctacttcagaaaagtacctctctccctcctgactcttctcagactaggcattagtaaattaggaccattttatctgaggagatttcgacaaagaccccagtgttaaccaggagtcttgccccccaatatacagcttttatgccataattggtccaacgttctgtggaccattaaagagcaaggatggactgccccaaccagtttttgtaatttcctgaaaccatacattcattttattagaggatcatagaagttaaaggcttaaaacaaactttgacaattaagacaggataccaagatgcaaatgtctggttggaatgaatcaaatataccgttggcatgttaaacaaaagcaattgttatgcttgtgcacatggcaggccagaggcccagattgtcccctttccactaaggtagtcctccagtcgaccaggcatggacttcatggtagctcttttccaggattctacagcctggagtaataggttgtgccaagctgtctctgctatatcccaaagtccagcaccctgtgggtcagcccccgagggccatccagcttccttctcccaacactaagttcacttcgtgtctctcacgacagcaaggaaacttagcattccctggagacctgaagggatgcagtgagcttaagaattttcaagagtttatcaataagtcagcccttgttcatccccgagaggatgtctggtggtattgtggcggacctttactggacactctgccgaataactggagtggcacttgtgctttagtccaattggctatctctttcaccctggcatttcatcaaccagaatgagggcaggtgatagaagaagatggatccggttatcagatggaagaatagccatgccacaactgctaggagctgcagtcgtactggctgtgcatgagaccacccacctaggccaagagtcacttgaaaagttgttaggccagtacttctacatcttgcatctgtcagcccttgccaaaacagtggcacagcagtgtgtcacctcctagcagcacaatgctaggcaaggtctaactgtcctgcctggcatacaggcttatggagcagccccctttgaagatctccaagtagacttcaccaagatgcccaaacgtggagagctcatccctaggtttggactgcccttatgaattggcttggacaatgggctggtgtttgtggctgacttggtacagaagacagcaaaggtgatcaggtgtagatcaaggattagaacatagccctcttgcagccacggtgaaaaggaccccagactgtggtcttgaccactcccacagtggtcaaggaatcccagcctggatccaccacagccccatgaaacccgcagcacctgagacctgggaggcaagaccaagcccggagaatccctgcaaagtgactctgaagaagacgacaagccctgatccagtcacacctggaagctgactggtccatgcatggccaaagcatgaggaaactcaccatgggatttattttccttaaattttggacttgtatggtagggacttaaactgatcttcctcaaactaaggattgttcccagtgtatacatcaggtcactaaggtagggcaaaaagttaaaactgtctttttgttctatagttattataaatgtgctggaaccctaaaagggacttgtttgtataatgccacccagtacaagggatgtagccaagaagtgcccagcctgatgtgtgttataacccatctgagccccctatggtcacagtgtttaaaataaaattaagaacagtcacctggtggggtctaaaccatactaaaaagaatccatttagtaaattcccaaagttgcaaaccgtgtggacccacctggagtcccaccgggactggacagcccccaccagattatactggatatgtgggcatagagtttacgccaaattacccaaccagtgggcaggtagttgtgttattggcactattaaaccatccttcttcctactgcccataaaaacaggcgaactcctgggcttccctgtctatgcttcccgtgaaaagagaagcatagctataggtaattggaaagttgatgaatggccccctgagagaatcatacaatactatgagcctgctacttgggcacaagatggctcatggggatatgggacccccatttacatgctcacccaaatcatatggttacaagctgtcttagaaataatcactaataaaactggcagagccttgactattctggcccagcaagaaactcagatgagaaatgctatctatcaaaatagattggctcttgactacttgctagcagctgggggaggggttactaattgctgtctacatatagatgatcaagggcaagtagttgaagacatagttagagatatgacaaaactggcacatgtgcccatgcaagtatggcatggatttgattgtggggccatgtttggaaaatggttcccagtgttaggaggatttaaaactcttataataggaattataatagtaataggaacctgcttactactcccttgtttgctacctgtactccttcaaatgataaaaaaccttcatcgctaccttagttcaccaaaatgcttcagcacaagtgtactatatgaatcactatcgatctgtcctacaagaagacatgggtagtgagaatgaaagtgagaactctcactattcagtgagattctcaaaggtggaaataagggaggcgaccactcctcatattgtcttatgcccaatttctgcctccaaagaaagaagcagcaaaaactaaaaggcagaaatgaaatccacaggcagatagcccagcttgcgccctgggcctggtagttaaaaatcaactcctgacctaactgcttctgttatctatagattccagacattgtatggaaaagcattgtgaaaatccctgtcctgttctgttccgttctgattaccggtgcatgcagcccccagtcatgtaccccttgcttgcttaattgatcacgacctgctcacgcggacccccttgtaagcccttaaaagggacaggaattgctcactcagggagcttggttttttgagacataagtctgccgatgctcccagccgaataaagccctttccttcctcaactctgtgtctggggggttttgtctgtggctcgtcctgctacattcacaggcgtgtgtgtgtgtgtgtgtgtgtcctaatgtgaaaaaggaaaatgcttactactcaaaccaacatattcacccttatgaataattaactcatttcccatacctgagttgtgtcttttgcaataccagaaacacccttagcactccctaaagttccatttgcttcctttgatatattaatggtgttacacaatgcactatattgcagagttactgacataaagtcacatctctgcatccctgaaaacacttaaaaagagacatccaaaagcaattcacgaaccctgattggatcctggcttgaaagaaaaggaaaaacaagctataaaagacatttgcataacagttagtggaatttgcatatgaacataatgaaattattgccaattttcctatgcatattgtgatattgcctgttgaactgaatcaaatctgccattaaaggaggactgtttttcagcattattcaaaataatgtgttatgggcactaaagtatatctttaaaggcagcctcggaatattttaacatgatggtactgagacatcctaaggtgtcagctttgagaaggcaatacaatttggaggcataagttccaagccattagtttagaaattgagtcataccagtgaaataccagcattatcaccgttaatgtccgtcagtgattagcacatcaggacatcactgtccccttagatgatagcagtaaaggatttctttttatgggcttattagttggtgcccctgcaggaaacagaatccaactcagatggtttgagagacttaaatgaagggactacttataaggctgtgagcaggctgaagtcaccgagagattagcaacagtgggaagtgggtactgcccagcagtagctggagctcctgaggaggggacagccatcgggagctacagctgtagagagacatgcggcgtctgccagaaaaattcagcccagagtaaggaagaactatcccaggccctgtctcctcggggcaccactcatcgcagtgccccctagtggctgaacccgagagagccccagagccccagggtgcagttcttagggctcagtccctggggcaggggaagagccagggcaaatagaaaaataagccctttatattcaccagaatagttcatgtctgagtgtttggacgcattttcagtaagtagatacgcataagagccttggagagggtagaatttgttcagtgcttttggctcccatttattttaccaaaggcaaattatgatcaactgtgcttttaaaaaactctttggccagtgtggtggctcacacctgtaatcccagcactttgggaggccgaggtgggcaggtcacaaggccaagagtttgagaccaacctggctaacatggtgaaaccccgtctctactaaaaatacaaaaattagctgggcgtggtggcacgtgcctgtaatcccagctactcaggaggctgaggcaggagaattgcttgaacccaggaggcagaggttgcagtgagccgagattgtgccactgcaccccagcctgggcgacagagcgagactctgtctcaaaaacataaataaataaaaataaacccacaaaaaacaaaaaaaaaacctctttggttctccatgatactattactgttgtaatggctttaatgagccaagagcatgctgtcttctttattaactgccgtaatttaaacaaatattagactagaaaaggtatatcgacataagcagtgattctcagatttggctaatgtcctggtggtaagttacacacacaccactgccaccaccactaccaccaagtcccggcaggtagttcagacccagatagcaccatacggtttgtggatcagcatttgatcagcacatagctgggacaccaccttctaatttcatgattattctaggacctcaaaaatggcatgtggtttacaacgatgtgcttcttttcattgagtttcatttattgcttttgtactgtctttgaaaatgagtaggggccatgttccctccttcccctgtgatgcctgttggatgcacatgagaggacgtggcagccagcgtgactcatggttcctctccatgctaagtaagccacaacgctgctgcccaacttaggtcacaatgaaatttttgatgtgtcacagtatctcgtgtttcctcagcccagaggcatgagacaaaggttggagagtagatgccagcagtacttggctggttaagggaaccagaggaggccaaggaaatcatgcccaaggccctcacctctttccagtgccacagatcgcataagccaccacctccagtgcccccaccacatccaaatacaatcttagggagtaacagtgaggccagaacccagggaattaagagagaggtcatctctccaaaagcaactgtgcatgaccacagccgactgcctacatgatcagattaggctgtttttttattgtgatgaaatatacataaatttgtcattttaaccatttttaagtatgcaattcagtaatattaaacacattcacattgctgtgcagccatcacgactgtccacctccaaaactttttcaccatcccaaactgaaactctgtacccatttagactaaattttaaacaaagttcgaacttcagttaactttttcttgctcaccaatatgtgaagggctcgtgaggaccaggtcagtcattgacaagatgacagaatctttttctcacttctgagttgtagtgt

SEQ ID NO: 943 - DNA, 3743 bp, Homo sapiens
tctttcacaggaaatccgacgatgactcttgggtgagcaacggcacctatttggaacttagaaaagatcttggtttttccaaactggaccatcctgtcttatggtgaaaaagtaaagaagaaagataacattagtgtatttctcctgtgcttgccttctgaagtggcacaaacctgtgtttatatatttaaaagatactctaggatgatcacttgtgcttagcttagcattgtaactctttaagtctatattttcctcagtgcgtttctttacaatttcaaatgttaccctgattgtttatatgaatgtagaacaccttgacatttctttttatatataaactatttaataaaaatgaaagattgaatgttcatgtgtgggttaaaaaaagaagctttaacactaattttccaaaggttagggaagattccaattaaatttatgccttataaaattatgttgtagaaaaaaaatcaacctctcccaggtgcattaagaaataagaattcccagggttactcacccatgcgtaagctacccaagtttaatttggtagctgaaatatctttttgcctcagacagctcttgaattgctcatacagaacaattctgctggtgctggagtctgaagaatattttcatttgcattttagtggttagggagaggatataagattaatggaatgtatatttttatataagacgtatacggcaccttcttgaaaaggaagcatttgaacttgttcctccctatagttctattgccttatatgcaaaattgtaccctgttgctcagagaaattattcataagagaaaagaattccaattaattaaatatcacaatagcatcccagagagacagtaggaaatttctccttagtgagagctgagtccttgagaagttaagagactgtttcctgcttcccaccccaccccgttttttgtccctccgtttgatcacctccctgttgagtatggaatgtcccagtttaatataaaacatacagtttattccacacagcagtttgactttgtaaaagtttagcaaaataactgattgttttggataactcaacatgtttttcttaaatgctgttttagtattttctacctcttaataagcaccatattttagatcttgtataaaaagttgccatctgccttatagacaaatgtagagaattgatgttcttgctttgtgttgtgttctggtaaagctttaagtgagtgtcttacccctttcctatactttcttgttatccatatcattcttttgtgagttttgcagcagtcttgaataatacagattataactactgaaaggggaaccttcgtctttttaaatgtgttatttcacattacaataatatgtgtagtagttgaattgtgttatcaaagcatgtccaacttctgtccagatgacattaaaaccaaagcctaattgttaagcctcttattctaaagtccatagcaatgctatggaatatcaagtataatgatgtagtaaaaagatttctccagaaaacactttgagatacttaaagaaattcagagcatatcgaatgttatgaatgaagagtaaaataattacaggaaaagaatgcatgatttttcattgtcacaccaaataaccagttggacaatattgcattttcaaaatggagagttatttaaagtggatgtgtagccttctggaatctgcacgtgactggcattttaaaacaactcattaaatattggattcattttatcgagatgccaagatgaacacaatgtgaatatcatttccatttctaagcagttgaatgacacagtcagattctttggtgtatgctttgttctttccatctcaagcatttatccaaattctgctcacagacatgaggaagcaggctgtagatttaagggcactcaaggggaaaacaaatgtagtttccacagtgtgaggataaatgtagaatcgtggtaatattggctgttaaattggcctgctccagagactggctcaaaaaagaaagaagcaacgaaaacaaaatgcacagcctgaatggacgtagcactgtcatgtggcatttggaaaatctttaattatcctaatgttatttcacttgcccttatgctttattttagagtcccagggacaactggatgaaacattacgtctgtagtcatcttatttgagatgggggtgggaacgaattaaaatatgatagagaactatatgcagattttaaaatctagtcagtactagcatctataaagggcttttctgaaatttaaacagcttggtgatgcatcctgatattataagcttaaaactatcttgagggggaaatgacttcttttctccttctgtcccttttctcaaaagcatctttcccccaaatgtatgtctctaggacattttatagttttaagaggaagaaaacagaaacgtggcatcatttgggaagaaccaaggtagaatttaattttctggactttaaatctcctggttaaataatgctaatcactgtaccatttgagttacatgttttaacctcttttttttttctaattattccatccaaaatttctggtgaattacacagaaatttttggaaatgggactttgtgcaggtaaccaccctgcacttcaggtaatgttcctgtcacagctgtcgactaccccacgctgcaggaaatccattcagaaatgagctaacagtctccagtgtagcaggagagccagtcacttccctccccaggccccaaagcaccccaaggctggtattccttgagtcataggtattaataataaaagcctcaatgcagcttctccatgtagttcctctcctacaagccaggtggattctggtcctaactaaagagatgggagttcacctgagggcaagaagtacccaggatgcccaaacagccgcacaggtgtcctgtgcttcctgtgagacttcctgggggaaatatacaaactaatatattttttaatgtttacgtcatttacactgctgcttttctcatattctgcttttaattacttgtagtaaatcatttgtttgggcttcaagcactgtcttccatctgcatcttccagatttatcatgagtgatcttgttctactgttaaagatgtcaagcctaaaaagtaataaagtttttatttggctgttgaaccttgatgtagcccctactacatacactacaagttatgccttctggctactacagaatctccgcagaccttttagttatgagtagaagcaataagaaggtgtccttatggtcttaggaataatagttccaatgtattggcataatttgtttgaatgtctttattttgatattaacaccggcataaatctatttttgctaccagatgatagctattttcatttgctctattttcctctgcattgtactaatctgttactcagtgttagtcttcatttttctgtgttggaaacctgcgtcatgtaaatatctgcaaatcatgacagtctaaagtgcaaaccattttcagagactttggggaatgcagtgatcagaagtggctaatttattttatttctgattattttatccagagggtacttttttaatggatatttgtaaatcttccacttaaccactgaaaattattttgttttaatcccacccttccatccatacctctgcctccccaaaaagctcctattaatttgcttatccccctcatgtagctagttgaatgtgaataaataacatgg

SEQ ID NO: 944 - protein, 65 aa, Homo sapiens
MVLGIIVPMYWHNLFECLYFDINTGINLFLLPDDSYFHLLYFPLHCTNLLLSVSLHFSVLETCVM

SEQ ID NO: 945 - DNA, 6770 bp, Homo sapiens
tcgggctaatcgccgggcggcgcgcgccgagaagttctgggcaaagtactcagaactggccgcgtgctggtggcgcccgccagccggcccgggagaggggacttgagcgcttcgcggccggtgcgcagcgcggctccggccccgcagtctgtctgcaagtggccatccccgcccccgactcctgcggccggtgcgggagctgtcagctgcacgttgcgggggtaccggagaagccggggttgccttctcccggttctgtgcgctaaccccggagcccggccccggggaactagggagcgtctccggctgcacagcgctcaggttttagggtttcctttgggccacccaaaatgttttttaaatactttggataagagctaaaccacctgccactggggacttccatactctcggctcccttgtcatctgatggcattttgattgtctcgaggccaagtgacttgctgtccatgatgagtgatgagaagaaccttggtgtgtcccaaaaattggtatcaccttcaaggagcacaagtagctgctcttccaagcaaggaagtcgacaggacagctgggaagtggtggaaggactgaggggggagatgaattacacccaggagccaccagttcagaaaggatttttgctgaaaaagaggaagtggcccttaaaaggctggcataagagattcttctatctggacaaaggaatcttgaaatatgccaagagccaaaccgatatagagagagagaagctgcatggctgcattgatgtcgggctctcagtgatgtctgtaaagaagtcatcaaaatgcatagaccttgacaccgaggagcacatctaccatctgaaggtcaagtcagaagaagtctttgatgagtgggtatcgaaacttcgccaccacagaatgtatcgtcagaatgaaattgccatgtttccacatgaagttaaccactttttctcagggtccaccatcacagactcttcatctggggtgtttgactccatttcaagtaggaagcgtagcagtatatcaaagcagaatttatttcaaactggaagcaatgtatcattttcttgtggtggtgagacacgagttccattatggttacagtcttcagaggacatggaaaaatgctccaaagacctggcgcactgtcatgcctacctggtagaaatgagccagctcctgcaaagcatggacgtcctgcatcggacatactcggcaccagctatcaacgccatccagggtggatcttttgaaagtcccaaaaaggaaaaaagatcgcacaggaggtggcggtccagagctattggcaaagatgctaaaggaacactgcaggtcccgaaacctttttctggcccagtaagactacactcctccaatcctaatttgtcaacactagattttggagaagagaaaaattattctgatggctctgaaacctcatcagagttttctaaaatgcaagaagatctgtgtcatattgcccataaagtttacttcactttaaggtcagcttttaatatcatgtcagcggagagagagaaactgaagcagctgatggagcaggatgcctcctcctccccgtctgctcaggtcattggtctgaagaacgccctgtcatccgccctagcacaaaacacagatcttaaagaacgcttacgcagaatccatgccgagtctctgctcctcgactcccccgctgtcgccaagtcgggtgacaatctggcagaggaaaactccagagatgaaaaccgagctctagttcatcagctttctaatgaaagtagactctccatcactgactccctttctgagttttttgatgctcaggaagttctgttatctccaagctcttcagaaaacgagatttctgatgatgactcatatgtcagtgacataagtgataatctttccttagataatctcagtaatgatttagataatgagagacagaccttggggcctgtccttgatagtggtcgggaagcgaagtcccggagaagaacgtgcctgccggcgccctgcccgagcagcagtaacatcagcctgtggaacatcctgaggaacaacatcgggaaggacctgtccaaggtggccatgccggtggagctgaacgagcccctgaacacgctgcagaggctctgcgaggagctggagtacagcgagctcctggacaaggccgcgcagattcccagccccctggaaaggatggtatatgtggcagcctttgccatatcagcgtatgcatctagctactaccgagctggaagcaagccatttaatccggttcttggagaaacatatgaatgtattcgggaggacaagggcttccagtttttttcagaacaggtcagccaccatccgcctatctctgcgtgtcatgctgagtctagaaattttgttttctggcaagatgtgagatggaaaaacaaattctggggcaaatccatggaaattgttccaattggcacaacccatgtgactctgccagtttttggggatcattttgagtggaacaaagtgacctcttgcatccataacatcttaagcgggcagaggtggattgagcactatggagagattgtcatcaagaacctgcatgatgattcctgctactgcaaagtgaattttataaaggcaaaatactggagcactaatgcccatgagattgaaggcacagtgtttgacaggagtggaaaagcggttcatcggctgtttgggaaatggcatgaaagcatctactgtggcggcggctcctcttctgcctgtgtatggagagcaaatcctatgccgaaaggctacgagcaatactatagcttcacacagtttgcgctggaattaaatgaaatggatccatcatcaaagtctttattgccacctactgacactcgatttaggccagaccagaggtttctagaggaagggaacttagaagaagctgaaatacaaaagcagaggattgaacaactgcagagagaaaggcggcgggtcttagaagaaaatcatgtggagcaccagcctcggtttttcaggaaatccgacgatgactcttgggtgagcaacggcacctatttggaacttagaaaagatcttggtttttccaaactggaccatcctgtcttatggtgaaaaagtaaagaagaaagataacattagtgtatttctcctgtgcttgccttctgaagtggcacaaacctgtgtttatatatttaaaagatactctaggatgatcacttgtgcttagcttagcattgtaactctttaagtctatattttcctcagtgcgtttctttacaatttcaaatgttaccctgattgtttatatgaatgtagaacaccttgacatttctttttatatataaactatttaataaaaatgaaagattgaatgttcatgtgtgggttaaaaaaagaagctttaacactaattttccaaaggttagggaagattccaattaaatttatgccttataaaattatgttgtagaaaaaaaatcaacctctcccaggtgcattaagaaataagaattcccagggttactcacccatgcgtaagctacccaagtttaatttggtagctgaaatatctttttgcctcagacagctcttgaattgctcatacagaacaattctgctggtgctggagtctgaagaatattttcatttgcattttagtggttagggagaggatataagattaatggaatgtatatttttatataagacgtatacggcaccttcttgaaaaggaagcatttgaacttgttcctccctatagttctattgccttatatgcaaaattgtaccctgttgctcagagaaattattcataagagaaaagaattccaattaattaaatatcacaatagcatcccagagagacagtaggaaatttctccttagtgagagctgagtccttgagaagttaagagactgtttcctgcttcccaccccaccccgttttttgtccctccgtttgatcacctccctgttgagtatggaatgtcccagtttaatataaaacatacagtttattccacacagcagtttgactttgtaaaagtttagcaaaataactgattgttttggataactcaacatgtttttcttaaatgctgttttagtattttctacctcttaataagcaccatattttagatcttgtataaaaagttgccatctgccttatagacaaatgtagagaattgatgttcttgctttgtgttgtgttctggtaaagctttaagtgagtgtcttacccctttcctatactttcttgttatccatatcattcttttgtgagttttgcagcagtcttgaataatacagattataactactgaaaggggaaccttcgtctttttaaatgtgttatttcacattacaataatatgtgtagtagttgaattgtgttatcaaagcatgtccaacttctgtccagatgacattaaaaccaaagcctaattgttaagcctcttattctaaagtccatagcaatgctatggaatatcaagtataatgatgtagtaaaaagatttctccagaaaacactttgagatacttaaagaaattcagagcatatcgaatgttatgaatgaagagtaaaataattacaggaaaagaatgcatgatttttcattgtcacaccaaataaccagttggacaatattgcattttcaaaatggagagttatttaaagtggatgtgtagccttctggaatctgcacgtgactggcattttaaaacaactcattaaatattggattcattttatcgagatgccaagatgaacacaatgtgaatatcatttccatttctaagcagttgaatgacacagtcagattctttggtgtatgctttgttctttccatctcaagcatttatccaaattctgctcacagacatgaggaagcaggctgtagatttaagggcactcaaggggaaaacaaatgtagtttccacagtgtgaggataaatgtagaatcgtggtaatattggctgttaaattggcctgctccagagactggctcaaaaaagaaagaagcaacgaaaacaaaatgcacagcctgaatggacgtagcactgtcatgtggcatttggaaaatctttaattatcctaatgttatttcacttgcccttatgctttattttagagtcccagggacaactggatgaaacattacgtctgtagtcatcttatttgagatgggggtgggaacgaattaaaatatgatagagaactatatgcagattttaaaatctagtcagtactagcatctataaagggcttttctgaaatttaaacagcttggtgatgcatcctgatattataagcttaaaactatcttgagggggaaatgacttcttttctccttctgtcccttttctcaaaagcatctttcccccaaatgtatgtctctaggacattttatagttttaagaggaagaaaacagaaacgtggcatcatttgggaagaaccaaggtagaatttaattttctggactttaaatctcctggttaaataatgctaatcactgtaccatttgagttacatgttttaacctcttttttttttctaattattccatccaaaatttctggtgaattacacagaaatttttggaaatgggactttgtgcaggtaaccaccctgcacttcaggtaatgttcctgtcacagctgtcgactaccccacgctgcaggaaatccattcagaaatgagctaacagtctccagtgtagcaggagagccagtcacttccctccccaggccccaaagcaccccaaggctggtattccttgagtcataggtattaataataaaagcctcaatgcagcttctccatgtagttcctctcctacaagccaggtggattctggtcctaactaaagagatgggagttcacctgagggcaagaagtacccaggatgcccaaacagccgcacaggtgtcctgtgcttcctgtgagacttcctgggggaaatatacaaactaatatattttttaatgtttacgtcatttacactgctgcttttctcatattctgcttttaattacttgtagtaaatcatttgtttgggcttcaagcactgtcttccatctgcatcttccagatttatcatgagtgatcttgttctactgttaaagatgtcaagcctaaaaagtaataaagtttttatttggctgttgaaccttgatgtagcccctactacatacactacaagttatgccttctggctactacagaatctccgcagaccttttagttatgagtagaagcaataagaaggtgtccttatggtcttaggaataatagttccaatgtattggcataatttgtttgaatgtctttattttgatattaacaccggcataaatctatttttgctaccagatgatagctattttcatttgctctattttcctctgcattgtactaatctgttactcagtgttagtcttcatttttctgtgttggaaacctgcgtcatgtaaatatctgcaaatcatgacagtctaaagtgcaaaccattttcagagactttggggaatgcagtgatcagaagtggctaatttattttatttctgattattttatccagagggtacttttttaatggatatttgtaaatcttccacttaaccactgaaaattattttgttttaatcccacccttccatccatacctctgcctccccaaaaagctcctattaatttgcttatccccctcatgtagctagttgaatgtgaataaataacatgg

SEQ ID NO: 946 - protein, 883 aa, Homo sapiens
MMSDEKNLGVSQKLVSPSRSTSSCSSKQGSRQDSWEVVEGLRGEMNYTQEPPVQKGFLLKKRKWPLKGWHKRFFYLDKGILKYAKSQTDIEREKLHGCIDVGLSVMSVKKSSKCIDLDTEEHIYHLKVKSEEVFDEWVSKLRHHRMYRQNEIAMFFVNHFFSGSTITDSSSGVFDSISSRKRSSISKQNLFQTGSNVSFSCGGETRVPLWLQSSEDMEKCSKDLAHCHAYLVEMSQLLQSMDVLHRTYSAPAINAIQGGSFESPKKEKRSHRRWRSRAIGKDAKGTLQVPKPFSGPVRLHSSNPNLSTLDFGEEKNYSDGSETSSEFSKMQEDLCHIAHKVYFTLRSAFNIMSAEREKLKQLMEQDASSSPSAQVIGLKNALSSAQNTDLKERLRRIHAESLLLDSPAVAKSGDNLAEENSRDENRALVHQLSNESRLSITDSLSEFFDAQEVLLSPSSSENEISDDDSYVSDISDNLSLDNLSNDLDNERQTLGPVLDSGREAKSRRRTCLPAPCPSSSNISLWNILRNNIGKDLSKVAMPVELNEPLNTLQRLCEELEYSELLDKAAQIPSPLERMVYVAAFAISAYASSYYRAGSKPFNPVLGETYECIREDKGFQFFSEQVSHHPPISACHAESRNFVFWQDVRWKNKFWGKSMEIVPIGTTHVTLPVFGDHFEWNKVTSCIHNILSGQRWIEHYGEIVIKNLHDDSCYCKVNFIKAKYWSTNAHEIEGTVFDRSGKAVHRLFGKWHESIYCGGGSSSACVWRANPMPKGYEQYYSFTQFALELNEMDPSSKSLLPPTDTRFRPDQRFLEEGNLEEAEIQKQRIEQLQRERRRVLEENHVEHQPRFFRKSDDDSWVSNGTYLELRKDLGFSKLDHPVLW

SEQ ID NO: 947 - DNA, 25430 bp, Mus musculus
  misc_feature (1)...(25430): n = A, C, G or T/U
cttgggaggcagaggcaggcagatttctgagttcgaggccagcctggtctacaaagtgagttccaggacagccagggctacacagagaaaccctgtctcaaaataaataaataaataaataaataaataaataaataaaaaataataaacaaactcttattctgctctaacactcataacattcacaaagttgctttaaggtgaggctatgttatacaacacagagtgaggacaagcccctgcaagctgccaagggaaatgaaatcattaaaactaattttttttttccaggcagagcctcactgtgtagcccaggctagcctggtacttaattatcttgtggctcggggctcgggagagcttgagattgcgagtgtgtaccaccactcttccgctagacgtttcactctttttacgtttgagatggggtttttctatgttacgcaggctgactcagcttcccaagcagttgggatgacaggtgccattcaccacccacttctggccattaagattttttctaaaacggagttgggaggttgcaagaggcctgcactcagacctgctaaaggttaaaccacagaatgttccaataggcttgggtaaacaattaaagccagtgtctgctggccttccacatttctcagttggagtaccctcaataactaacaggcaggtttgcgattcagggtgtgtgcccaggcaatgctgcctccaaaagctactctggaaacccccacttaaaaaccaagcaaaagaagcccctccctgtgccttatgcactgttttagggtactctgattcagtgtgtccaaactgttcctagataaaagctacttccttggacttttgtgttttgtgggggtttgtttggtttggtttggtttggtttttgagatgggcttagtatgtagctttggcgcccaggagcttactgtgtaggtcagcctggcttcaaatgtagagatccatactttttaattttttaaaaactagtattacatttcagagtttatgtctaaattgggtgtggcacccagtgtctgtaaaacccaggactggcaaggttgagacaggaggattatcataaatttaaggctaactaagattacaaaatactctcttaaacaacagtaattttttttttttaaatgtaagtcttgaggaagcagaatgtgtatgcannnnnnnnnnnnnnnnnnnnnnnnnnnnnnnnnnnnnnnnnnnnnnnnnnnnnnnnnnnnnnnnnnnnnnnnnnnnnnnnnnnnnnnnnnnnnnnnnnnnnnnnnnnnnnnnnnnnnnnnnnnnnnnnnnnnnnnnnnnnnnnnnnnnnnnnnnnnnnnnnnnnnnnnnnnnnnnnnnnnnnnnnnnnnnnnnnnnnnnnnnnnnnnnnnnnnnnnggctaccctacaaagcagcacaacaaaagcatgtaaaggccaccaagagccccaaatgccgcagacccaccacgtttctcctgaacaaaaggccttcctgcacggcattcaggggactgagagcttgtcacccaaaggagactatgctttttggttctccccaacatctagtctaaagcgcaattgtttggttgaaattgtgagataagactcactctctcactccagcctggaactcactatatagcctaggctagcctccagctcaaagtgatccgtttccagtgttgatcaattgctagaattaaaaagcatgaaccattacatccaacttctctttgttcattttagagatgaagtcctgacatataacccagccagctgaaactagctgcctcttcagactgcaatatccctctttcctagttcctcattccattttctctctttttttttcttacttgtgtttttttttcttacttgcttttgttttgctttgtttttgagatagattctgtctatagctatatagctgaggctggccttgaactcctgatcatgttcaatctgcttcccaagtataaagagtatgggagtgtcgtgctatgcctgactttttattttattgtcatttttctttttgagactctgttagccaaggctggcgccaagctcaccgtgtagtccaggctggctcctgcttggctttctcaggatgagattacaggagtgagccatatgctggcataaaacgtgactttgcaagtagccttcattctcattcctatttcgggaaccagaaactgaaagttccagaggaaaacttgcccaaagctgcccagcacatacatcaggagagcccaagcccaagcccaattcactagatactgagagcatccttaacacactgccatggcttgcatcctgccacagcatccagccacagcatccagccacagcttccagccacagcttccagcctattccctcattccttacaaagggactgtaactcaaaggtgagttcccactcccaagtatggtactgtgagcctgtgagcctgtgagccgggcaccagtgagctgaggacagcaggatcgttgtcagctacatagcgagtaccatgccagtctgggttacatgagatcttgtctcaaggggggaaaaatcacacttttgtaacaacccaggctcagaaaagccactgagcttttaatttcttctgaagttctagaaacaaaacaaaaacaaaaacctcttctttctagaaacaaaaacctcacagaaaaacaacctgagtgggtcacacccaacccagagtctacctcagagttcttggttcagtccttagcaaagaaaggaagggaggaaatgggggagggaagaaggaaagaagggaggtagggagggagaaaagggggaagaaaggaaggaagggagaaagagaggaagggagggannnnnnnnnnnnnnnnnnnntaaatttaaggctaactaagattacaaaatactctcttaaacaacagtaattttttttttaaatgtaagtcttgaggaagcagaatgtgtatgcagctatgtgcacgcatatgacagatgctgtgccaaagggaactgacggagatgggggaggaagaagagagtttaattctgtggggaattccagacatagagaaatatgagaaattcccacaggtccaagaagttaaggagccattaagcaaaaatgggtgcctggggctgggcatgggtagaactgaaggggacgggcatgggtagggctgaagctgcctcacgagggcttgggaaagtgggtgaacacttggattgcctgcatagggaggctggctttagcctggaggtaaggtgagtttactcaaatgtgtttggggaacacaacaagcactttccaaaggaatggatgggaccagacaggtgagtttggaaatggatgcatctagagaagagaccgtgctggcatccactaggaagctggagttggtgacaagaaaaaaaaaaaaaaaaaaaaacatcgtaaaatgacccagaatgcataaagatatggaacaactcgagctgtggtgcggggatcaaagctggacctggtcaggcgaggtgagaatcacagaacgacagccgggcccttacttttatgcttgcttgattttgtgttgtgtgctggctcacttggtagcccaggctagctctcctgcctcaccactccacccttcagttccagctttacaggtatgtgtgaccatgtctggcaccggcttccttgttcttatgttgtttaatttttttccccaagatagttttatttttaaatgtcaagcaaaaaacaaggctaccctacaaagcagcacaacaaaagcatgtaaaggccaccaagagccccaaatgccgcagacccaccacgtttctcctgaacaaaaggccttcctgcacggcattcaggggactgagagcttgtcacccaaaggagactatgctttttggttctccccaacatctagtctaaagcgcaattgtttggttgaaattgtgagataagactcactctctcactccagcctggaactcactatatagcctaggctagcctccagctcaaagtgatccgtttccagtgttgatcaattgctagaattaaaagcatgaaccattacatccaacttctctttgttcattttagagatgaagtcctgacatataacccagccagctgaaactagctgcctcttcagactgcaatatccctctttcctagttcctcattccattttctctctttttttttttttcttacttgtgttttttttcttacttgcttttgttttgctttgtttttgagatagattctgtctatagctatatagctgaggctggccttgaactcctgatcatgttcactctgcttcccaagtataaagagtatgggagtgtcgtgctatgcctgactttttgttttattgtcatttttctttttgagactctgttagccaaggctggcgccaagctcaccatgtagtccaggctggctcctgcttggctttctcaggatgagattacaggagtgagccatatgctggcataaaacgtgactttgcaagtagccttcattctcattcctatttcgggaaccagaaactgaaagttccagaggaaaacttgcccaaggttgcccagcacatacatcaggagagcccaagcctcccattcactagatactgagagcatccttaacacactgccatgacttgcatccagccacagcatccagccacagcatccagccacagcttccagccacagcatccagccacagcttccagccacagcatccagcctactccctcattccttacaaagggactgtaactcaagggtgagttcccactcccaagtatggtactgtgagcctgtgagcctgtgagcccggcaccagtgagctgaggacagcaggatcattgtcagctacatagcgagtaccatgccagtctgggttacatgagatcttgtctcaaggggggaaaaatcacacttttgtaacaacccaggctcagaaaagccactgagcttttaatttcttctgaagttctagaaacaaaacaaaaacaaaaacctcttctttctagaaacaaaaacctcacagaaaaacaacctgagtgggtcacacccaacccagagtctgaagagttcttggttcagtccttagcaaagaaaggaagggaggaaatgggggagggaagaaggaaagaagggaggtagggagggagaaaagggggaagaaaggaaggaagggagaaagagaggaagggagggagggagggagggagggagggaggaaaaaggacagttgggcattttggctcacacttgtaatccccaaatttagaatctgaggaggaagataattgtgagtttgagccgccgtggactacatatcatgttccaggccacctgagctacgttatgagattccatctcaaaaaataaaataaaataaaataaaataaaataaaataaaataaaataaaaatccaaagagaaagctggggaggttgctcagcagttgagagtacaatctgcctttgcagaagaacctgagtttggtcatccacacccatgtcaggtgactcacaacagtcccaggattccaacatctttaagtccttaaaacaaacaaacaaacaaaaacagaatgagactggggctatgctccacagtagattcttccctaaaggtgcacaaacccctgggttcccccagcactggaatccaaagacaaaagagtaaagttgttattagttgtgtagtttacattttctagcagagaggctggaggtgcagtgtgagtgtggctcgggaggtcgagggctcctctggcactgcagggagcactggactctctttccagctaggaaagaaaatgtggctgttggctgactggctgattgattaactggctgactgattgattgatgaatgattgactggagacacagtctggctttgtagcccaaggtagccttgaatgtgtgattgccccggctcagattcctgagttctggagcagcactgcacaaggctgtaaaacgttcatgacatttatgaaagtagcgttcttcttttcaaactaagttgctgtaatctgttgtgcattttccagcctccgttctcactagcagcgctgggagagctcactggccgtatggagtcagcgttgtactgggcagcaaaagaacagagcaagcatttgggggtgggaggtcttgggacagaacccagagctttggcgattctaggcaaactctgttgctactgagagagccttcgacactgagacagggtcttgagacgtagtcctgcctgtcctgtatctcattttgtagactagctggcctcccagagatccccctgcctctgcctcccaagatgttaaaggcattcgtcaccacactggcccaggcaggttctgttttataaacctccttgtggtttaagatgaatcttttaaaatatagaagttttttttttttctttttttggtttttttcaagacagggtttctctgtgtagccctggctgtcctggaactcactttgtagaccaggctggcctcgaactcagaaatccgcctgcctccgcctcccaagtgctgggtttaaaggcgtgcaccaccactgcccagctactgttaccttttaactatgtatgtctgtgtttgtgtgtatgaatagggtctgtggggccagaagagggcgtcagatccctggagctagagttacaagtaatgagttgcctgacccaggtgctgggaatcaaatttgggttctctggaagaacaatacatgcttttaaccaaagggccatctctccaggacccagttctttctttgtgaccactgagcccttgatcagcaggatggggacattctcaaggcctcttgaccttttgcctaagatcaagtgtagtacagacattctctgttgtgatctcattcctctttattctagatttttcttttgnnnnnnnnnnnnnnnnnnnnttgctcagcagttgagagacaatctgcctttgcagaagaacctgagtttggtcatccacacccatgtcaggtgactcacaacagtcccaggattccaacatctttaagtccttaaaacaaacaaacaaaaacagaatgagactggggctatgctccacagtagattcttccctaatggtgcacaaacccctgggttcccccagcactggaatccaaagacaaaagagtaaagttgttattagttgtgtagtttacattttctagcagagaggctggaggtgcagtgtgaatgtggctcgggaggtcgagggctcctctggcactgcagggagcactggactctctttccagctaggaaagaaaatgtggctgactggctgattgattaactgactgactgattgattgatgaatgattgactggagacacagtctggctttgtagcccaaggtagccttgaatgtgtgattgccccggctcagattcctgagttctggagcagcactgcacaaggctgtaaaacgttcatgacatttatgaaagtagcgttcttcttttcgaactaagttgctgtaatctgttgtgcattttccagcctccgttctcactagcagcgctgggagagctcactggccgtatggagtcagcgttgtactgggcagcaaaagaacagagcaagcatttgggggtgggaggtcttgggacagaacccagggctttggcgattctaggcaaactctgttgctactgagagagccttcgacactgagacagggtcttgagacgtagtcctgcctgtcctgtatctcattttgtagactagctggcctcccagagatccccctgcctctgcctcccaagatgttaaaggcattcgtcaccacactggcccaggcaggttctgtcttataaacctccttgtgatttaagatgaatcttttaaaatatagagttttttttttttttttatggttttttgtttctgttttttgtttttttcgagacagggtttctctgtgtagccctggctgtcctggaactcactttgtagaccaggctggcctcgaactcagaaatccgcctgcctccgcctcccaagtgctgggtttaaaggcgtgcaccaccactgcccagctactgttaccttttaactatgtatgtctgtgtttgtgtgtatgaatagggtctgtggggccagaagagggcgtcagatccctggagctagagttacaagtaatgagttgcctgacccaggtgctgggaatcaaatttggnnnnnnnnnnnnnnnnnnnnnnnnnnnnnnnnnnnnnnnnnnnnnnnnnnnnnnnnnnnnnnnnnnnnnnnnnnnnnnnnnnnnnnnnnnnnnnnnnnnnnnnnnnnnnnnnnnnnnnnnnnnnnnnnnnnnnnnnnnnnnnnnnnnnnnnnnnnnnnnnnnnnnnnnnnnnnnnnnnnnnnnnnnnnnnnnnnnnnnnnnnnnnnnnnnnnnnnnnnnnnnnnnnnnnnnnnnnnnnnnnnnnnnnnnnnnnnnnnnnnnnnnnnnnnnnnnnnnnnnnnnnnnnnnnnnnnnnnnnnnnnnnnnnnnnnnnnnnnnnnnnnnnnnnnnnnnnnnnnnnnnnnnnnnnnnnnnnnnnnnnnnnnnnnnnnnnnnnnnnnnnnnnnnnnnnnnnnnnnnnnnnnnnnnnnnnnnnnnnnnnnnnnnnnnnnnnnnnnnnnnnnnnnnnnnnnnnnnnnnnnnnnnnnnnnnnnnnnnnnnnnnnnnnnnnnnnnnnnnnnnnnnnnnnnnnnnnnnnnnnnnnnnnnnnnnnnnnnnnnnnnnnnnnnnnnnnnnnnnnnnnnnnnnnnnnnnnnnnnnnnnnnnnnnnnnnnnnnnnnnnnnnnnnnnnnnnnnnnnnnnnnnnnnnnnnnnnnnnnnnnnnnnnnnnnnnnnnnnnnnnnnnnnnnnnnnnnnnnnnnnnnnnnntgtttgtagatatagctcctccatggctgcctgagcaggcacgagggaaaacacataagtgtcccaaaatgattccgggattctaaatttattatagccaacaaaatgaaacaaaacaaaacccctcttatttgttggaggagctaagatttcctccttgacggtgttatttactctggggtgggaaagaatgtctgttctctttctgccctgttattgttctgtcttgacaaactccatccggagaagagcagattttctctggcggagagccacatgtggtggaaaaaccctttactcttaggcccccatcctaatctgtctgacaaccctctgacaactgaccagggtcaccaacccccacggtgacctttggaaggaagtgtaggactgctcaactccagaaggaaaggaggggctggtgagtgagccatttccccgactgtcctgtgtcctgtgacaaggataaggtgccctgcccctgctgtttgcactcctcccactgcctgaggtcagccttagcacccgaagaacattagagggggacaaagatcccacccccagggccaacttggaattttcctggagattttaaagactttaattatgtgtatgtgtgtgtatgtatgcacacgtatgttcacatacccacagaggccagaagagggcatctggaccgcccctgcccccccccccccccccgagatgcagatacaggtgtctgtgagcagccaggggtgggtgtagggacctgaacctgggttactgcaaaagcagcgggtgatcccaactgctgacccatctccctagcccccgttttctgggggatcttagagctctcttctcatacaggatggcccttggggacaaaggttgcccaacaaggtatcttcgcctgtacattcgtttctatctaaataatgctaatgtaagtccctgaaaaactagaattacttctttgaagcataaaagaagtttctgaaaacttaggaggactgttgatccttcttttctccttcccccctcccccaaccctgttgcttaagcttttgtttgggaggagactaggaggacggcagcagagggcagccgcctacctggagaaacctgcagttacgtgtgtggcaggagccggagtggctggagtcgcgggatggtcaggaggcgggctgaaagttggagtaagcaggaagtgaagctgtggctgccttgggtggaaacagactaggcgaagttctgctttgagaggcccaagtgctccgagacatggtgagtgacgtggggaccaagaaaagagcgagttagagcagctgccagagggggatcgggcctgggggttgcctgtgtcgagaaaggtaagttggcggcagtcagagggctggcggggttgggccagcgctgcctctgtctccttacttttgacaactcctccacaaatagctccgcactccgggccaggggttcctgacacttctccacctccttcctcccgtgacctcggtgctggatccgatcaggatttcggtgggggttgggggacccaaattccaagccgagctgctgcgccgcgccctccccctcctccgcctcctccagctgggcctgagcccggtgttgtgacattaccgggccacaagcgttcctgctctttggggctcagattccagccccgcggactggagttctcccccttaccctcgcactgtatctatgcagacacccagaggatctatctgcctggccaccaaaagcaccacccttttctagaaacattagcaacagtgccaagggtttgtaaagcagccagatggcggttcttcccgataatctagcttcagcccacacccgtggccggtacctgaggccccctgggtccctaagggaggagtcaggcctcttccctccttgttcaaaagccttatctagaggcctcctggatagagcgaccgcagcaggaaggacttttattaatatctgcataagcaggcggtggtgtgcggcctaccaggcgttaaattgtggggaaagcagaagtatatggtccaacggcacatgatgccttctgggggccacatccactgaaccggggctacactgcccagtaggctggaaccagaactcaccaacagctgtctggagaagggcatttatttgggttgggccgggcaagagtgtgctgctggtcaactctcacagttttagagagaacccactaggattgagccgagggaggctacaggaaccagttaatagttcttggctgtgctctgctgaggaaacgtcagctgggttttctccttgaccctctttgtggagtcaagacaggggcagtcgtgtgctgtttttttgtttgtttgttttttgttttttgtttttttttgtttttccttgtcacgctgaaaatcctccaaagaaggtggatgagaatccagggtcaaacctcatcttctgggacttaaaaaatgcacttacatggctggcagccgagatggctgggcaggtacaagtgtttgcagagcaagcctgcctgcctgaattcagtatcctgctctctcctgcccatccaactggaggagacaatccactcatgaaagttgtcctctcacctccacatgcgtgccgtggcatgtgcatacacgtatattccccagcacacacacacacacacaatgcacttatgacagactaaggatgtggttcagctgatagagtgtttgcctggcaagcgtcaagctctgggtttcatccccagcacctcataaaacaaggataatggtacacacctggaatcccagcccagggtaagtagagacagggggtcagatgtttaaggccatcctacttaggaagcctatggcctgcctaggttatatgagaacctgcctcagataaataaatctggggaggtggctcagtgggcttgctacgcaagcatgaagatttgcattggatccctagacccatttagaaggaaaaaaattccaggtgtggtggtgcaagcaagcacttaggtggctcctagtgctagggtggtggagaaggctgagccctggggctttttgtccactctaatctcagagcctcaggccaacaggagacccagcctgtgggggaaaaaacaagggaggagtgacacctgaccacccgaggctgatctgggatataaacgtgcttgcatcgaagtgaacatttacgtagaacattctcctggtaaacagttgaagcatcagaaacggctaaaatctactttagttcttccaacctcctctggcctcttggatcctctgctgcccggcctaattaaccccttattgacatccaggaggaggccagtgggagtgccggaaatgaccgagttaggaacctgcagagtgaggtggagggagtcaagaatattatgacccagaatgtggagcggatcttggccagaggggagaacctggaccacctccgaaacaagacagaggacttggaagccacggtgagattgggagaaaactgggagttggtgggggcagatctcggggagggggagaagtttgggtggggaggcaaagtgaacagaagggactgcagactgtcatgtctactgcccttttgcctatgcaggagatggctgaggttccacctctgcttccttgctactctgctggctggtagagagcccagtgagtggttggatttgagcttgggtgaggggcccacccacagagccatttctgagacagttcagtcaactgctccattcctaagcttcattggggtatgaaactgatttttgtctcaaagcttgcccttggcaaccatttggagttgatgtcccaaaggcaaagttatgagttccgggcaacccttggcctttcagcattctccctccaggtgtaattaggctggaagttggtggggggcgtcttgctgagtccgctttaaagcacagctgggaagaccaatgaaatcctttaaccccaggatccctgtgtgcaaaggccaaaataatatctcccacacatcttgcttagacctcctctttgctgccatggactgaggccaagctgctcagggcagaagaaagtctaacacaaaccaaggctggggcctcagttttcacttgctgtggagtacactggcttcctgggtccattgggttatcttggaatctagtgcctcctgcagcataagctgggcacatggagacttagtgtctgtattaacttggagaagcaggaggcttttttctttcttcctttcttcctttcttcctttcttcctttcttcctttcttcctttcctttcttcctttcttcctttcttcctttcttcctttcttcctttcttcctttcttcctttcttcctttcttcctttcttcctttcttcctttcttcctttcttcctttcttcctttcttcctttcttcctttcttcctttcttcctttcttcctttcttttctttcttttctttctttctttctttctttctttctttctttctttctttctttctttctttctcaagacagggtttctctgtgtagccctggctgtcctggaactcactttgtagaccaggctggcctcgaactcagaaatccacctgcctctgcctcccaaatgctgggattaaaggcgtgcgcaaccacgcccagctctttcttttaagtttctgcagtgctttggttcttccttcagcttctacagaactcagaagacaaagcaaagtatcattgagccaggacatgtgcccatctggagcacattcctgtaccccttagcttgtgggtctgtgctccaaaggccagatttctctaccagtcaaacaaactccaattgtgagcatatatctgtaaaagaccccttagtatgcaggttagtgcaggggcaagaaaaagaagggagactggacataagactcaggtggtagagtacttcactagacttcacgaagccctgggttcagtccctggcactatataaatatggtattgtggcacacgcctgtaatctgaactctttgaaggtagaggcaagtggatcagaagttcaaagccaggccattgagatggctcaaaaggtaaagacacttggtaccaagcctaaggatttgagttccatttgtgggattcatatggttggtagtcttgattcctataaaatgacctctgacctccactgtggcttgtgcacaccacacacataaacaaacaaacaaataaatattgtttttaaaagttcaaggtcgccgggcatggtggattaatcccagcactcgggaggcagaggcaggtggatttctgagttcgaggccagcctggtctacagagtgagttccaggacagccaggactacacagagaaaccctgtctcgaaaaaccaaacaacaaacaaacaaacaaacaaacaaaagttcaaggtcatcctttgctacaaggagtggaggccaggctttgctgtatgagatcccgactagaaagatagaaacagaaaaggaagggaccctgctatgctcagagggaagttttatgagttcaagaattctaaactagaacttggcttacagattgttgtagaaagacatttgtgaagcagccagagatagacagatctctgaagctcctggccatccaggcatacttagtgaggccctgtctcaaaagtaaaacaaaacaaaacaaaacaaacaaacaaaaaaaaaaaaaaccagagagagatcagtgggtaaagacttttgtcagcgagcctggctgcgtgggttcaatccccaggacatacagaggagaagagagaaccatttcctgcaagtcgacccctctccaccacgtgggcagtgtggcacataaggcagaggcacaaatacatgttataaagtatttttaagaacctttccattcctattgtaagaggaaagaattgttcacttatttgtgtttttatttcgaagtggctatcctccagctccagcgtctttttttccgtttcctacttcgatttataatgtaatgtaaacatctatactatggcatgtggtgtccgtctgtactctcagtctgagggcaggagctcacgactttatcttatccccaacagtctgaacacttcaagacaacgtcccagaaggtggcccggaagttctggtggaagaatgtgaagatgattgtcatcatctgtgtgattgtccttatcatcgtcatcctcattatactttttgccactggtaccatccccacttaagagtcccttccatcccaccctactcctcaggggtgacctccctaatatgtgccaagaggagccctctcctgtcctcctccacccaagtgctgctcagtccctgtgagggccttctgctgcatcagatgccccagacgcaccttgatcccctgggaggagacagctggactgtagctgcatctcatggtcctgagagtgggttacagagacccagaggaccctgtctgtggctgggaaactgttggtggctggtgggcaataaagacctcttggtatccctaagtgtacgaggcgctttactcctgtgtctttcaagtgtctgtttctttctttctgaggaacccctccaggctggtttctcccaatctagaaccaagatagtgcaaggattgagcacaggtttagtgaagaaagatggcagctcagaggctttgcatacctgaattagatatgccaatcactagacccagctagaatcaataagtcagtcagtctgtctgtctgtctttaaaaggacttttattttttaagaagaatgagtatgggtttagagagatggctcagaggttgagagcactgactgctcttccagaagtcctgagttcaattcccagcaaccacatggtggctcacaaccattctgtaatgggatctgataccctcttgtggtgtgtctgaagacagctacagtgtactcatagacactaaaaaaaataaagaaaattatttaaaaaaataagtatgagtatgtgaatgaagagcctgcagaggccagaagaggatgttggttcccctggagttacaagcccaacatgggcgcttggaaccaaactggagtcctctgcaagaacagtttgcactcttccccccttccccttaggtaaaagtttatgtttgattattaattaaaatataattatattgtgttgccccttccctttcctctcttaacacccctcaactcatcatcctcccttcacttcctctcaaattcacggcctctttctttcattgttttacacacacacacgcatacacagtgtgcagatttgtgtttggttttgctcgcatgtaaataattacagggctgagtacttggtgttgataaccaattaagaatctcaactctggagaattgttgttcctcccccctctgtgctagcatgcctgttgatgtccttgctcagatcttgtttaggcagccatattgttgaacagtttgcactcttaaacaacgagccatctttccatctctctccctctctcttgtatagatgtgtatgtgtatatctgcatcggtgaatgccggtgcttgtgcatctatgtgtgcaagtgtgtgcacgccggaggtcaatgttggatgtctttatcgctctctgtcttactacctagtggactcttcttcctgacggttgagcctacagcataaggtctgtgagataagagtctgtactgaggtacagctccagccctcaccccactttttgaaacagtcactcactaagcctggagctcatcagtttggcttagggatccatctccacagtgctgaggttacagaaagaagcacacataaaacttttatatgggtcctagagatttggactcaggtcccatgcttgcataacaagtgctttccctgctgagccctctcctgagccctcctgtttttctttgtaccacactgttcattgtcacaactcacaagaacaaggatttcctagagctcttaccataaggaggattagaacttcatagcactttagagtgggatgcaggattcagcgccctcctgggaccctgccatgtcccttaactgacctcctggatacgcttgcaaggatatgatgatgggtcatgtaagacctggttcaagggctcttgtcacttctgccatgtctcgtctatggcctaggtatgactcagagccagagagaggctgaaggagctagtcagcgtatcctttgtgggttgttctgtttgtcttttgtctatccttgcttttctgggtctttatagaggcctggatctcagctgttctgagggagtggtggtgagcatctctccctccccagagtcccatggctagtcagagtcaatgtcacaggaccaggctgacagcacaatgagctttctgtcttctggactcctccttcccaccaggttcttcatcactgcggttctttccagagcccagtctgccttggcttgtggttcttggcttcctctgtccttggttcctacacaacctttccagaattagaaacaacctgttgttgggagcatgtgaggaaagggatgggttgagagtcaaaaatgtgggatactaaatacaggccagattttggatcatgctctcgattccacagagggcagggaaagtaccaaacagcccctctccatctactttgacatgagtgagcctaccctcttcacccccagcccattctgaggtaatgtgtccaagcatggaaaccagtggtctatcctcacagtggctcaacccagggacaaaagcccctggcattttggttaagagaagccacatttaggatgtcaagggcagcctggaaggtggaagatggctttaactatttctccacagcagctcaggaaggctacacaaatctagaagcacaccagcatctccagcaaaggaacaggcctacaagcgtttagaacagctgggcagtggtggcgcacgcctttaatcccagcactcgggaagcagaggcaggtggatttctgagtgtgaggccagcctggtttacagaatgagttccaggacagccaagactatacggagaaaccctgtctcggaaaggaaaaaaaaaaagagtttagaacagagaaaagccagagtcagcacttcctgtaagaggctgctttcattttacattggagtcaaattcacatggccttcttttttctcttcttttctcctcttttcttttcctttcttttcttttctgttgttttcttctcttttctctttcttcctttcttcctttctttctttctttctttctttctttctttctttctttctttctttctttctttcttttaatagacaaagtcttactttgtagccttgaagcctaggttaagctgtcctggaatttactatatatgacccaggctggtctcaaactcagtcaatcctcctgcctcatcctcttaagtgttaggatcacaaccatagctacagagccagctcagttttctgtttggttttgttttattttgtcttcgggcaggctctcatgtagtaactgctcacattcattagacagcaggccatggctgtgaaccttgacccttctgctgctggctcgccgatgctgccatctaccaccaagtctggtttgtatgatgcgggacatcaaacccagggcttggggcaaaacaggcaagcccatccccagcatccatttacaattgagtttttgccttaaaactaaagtctttttaaaaactctttgttctttaaattatttttattttatgtgtaaagatgcttcctctgcatgtgtgactgtgaccatgtgtgacacgtgtccttggaggccagaacagggcatcggatcccccggagctggagttaacagaccgcagtgagctggcatgtagtgagctggcatgtagtgagctggcatgtagtgagctggcatgtaggtgctgacaattaaacctcagtcctctggaggggcagccaggactcttaactgctgagccgtctctgcggtctcacattttagccttcgattaagcacataaaacagcaccacttaatatattcctccgtgagctttttgtggaattcagagcacagcgtatcctttacaagtcttcaggctttctgcaccttttgcacagttctttacaaacaacctcattttaaccttgaagttggcctgaggctgggacgggccaatgagattaaggaaaggacttctcagttcccagttctgcaagaaaagccgcagtttcctcggcatctctcttcgtcaagaactccatcttcctcacctgttagaggaccatcccgcaaggcccacaccaggaatctaagagaaagtgtgtgttctcaggctgggcaacacctgtttgttttccttgcagcagcttgcaactctgtcctaaactcatgctgtgaaactcttcaagacagtctgtgtagtttgtattttattcttatccaaaagagatggtctctgcttgagtaccactttggaagctggctcccatcttctcctttgcctcttctgcctcttgttggttcaaaacttgagatccatccacacaccattgagacttttagctcacagaaatgtctgcaacactttagcattttaaaaatcttcctcccccaatgtatggagatcagaggccaacttgcaggagttggttctttccacaacgcgagtccattttttaaaaagatttatttatttattatatgtaagtacactgtagctgtcttcagacactccagaagagggcgtcagatcttgttacagatggttgtgagccaccatgtggttgctgggatttgaactccggaccttcggaagagcagtcgggtgctcttacccactgagccatctcaccagccctagcttaccatttttaagggtataactcggtgacatacaatgtattcagaatactgcctgttccgtctgtaaataatcagaactttggagtggttggtgtgtttttaatttcgggtgagacgcactcaccaaggtggcaaatacttctggcttgttcatgtcagctccagcacatagctcccacagatgctttttgcatgacggaatgacgcctcctgggctaactcctgatgcagccccagatccaagagacatcggtccccaattcaccaggctggggtgtcatcggaaatcggacgcctgtggcccggtaggaggcgccccacgggtcctgtcaccgctttcggtttgcccgggacgggcacctctgagaaggcgcgcccccctccctcttgggctgcgggcccgccccgccccacggcttcctcccgggccgcgggcactgaggccgctcggggcagaggaatcggagccggcgagcaggcagcggcggcggctgcggaggcaatggtgagacgggcaggggcagagggcgattgtgcaggggcaaaaagcaggattctgaaccccaggggcataggtcacgctggtcgcacggactagtccccaactttgcaggcaaccggggagggagacttcggagtgcgccccgtcggggcagagtgagcggtgctacagcttcccacgctcctggagcagttatcagctcccggcaataccgggcaagttacttaacctccacgagcctccttttccgcgcagtgaagtaggggcagcaatacttaccttggtgggtccttgagaggttaaagaagatgtttatggtcgctgctgccaggcactcagaaccctttgctgagaagtggtaggtaatgcgatgacctctccagctcttccccaggctaagaggagccagagctggcccaagggttggaaacctgagcagatgtgcctggtagaggccccgtgcttacgtgctgacagataaacacttccctgggggaaaagagaaaataagttgtttactataaaagttccatgaagttatccctgtgacccagcctgctgactctttcctaacctctacctagtaacataatcatgagttgagtcacctacattcactcctgctgcagacttgccatttccaagacaaaagtgtcagggaccactgatgcctggatcccaccttccagggctcctgggaaggtggccagactggaagcaagtttagtactctaagatgggatggatgtggcctggctaggggtggcaatgcctggatggcctcatctctagggaactggaggcaggaaagggaagtgtggcaggaaggtagccctaagctttgaggccacaccaggaaaccgagggaggctctgagaatgggctggagctgagagcccacttccgagagtacagggcagagatggtctttcaactggctctcagctcttgaggagaagttctgaaaagaaggctgcgccaggttaggttatctggctgttcaggagaaccttgggggttcagagtctgggggatgcattaattttatcccttcagcctgtctccagctccatcatctatctcttcttcccttgtccccctttctgtctccagctctttcctcctgcatcccatccctctgactaccatatatacccccacccccaactgatttccctttcctttcccttttcttcactgggactcattcagtcaaaatgatttaagaaaaaaattcttttttgccattggaatagcacaaaacagtgatggaggagatgaaaatgagagatggaaatgagcaatatttttttgcatgtgtggtatgcacgcttgttcacgtgtctgggcacatgcctgtttagatacatgtggaagtcagaggctgatgtcaggtgtcttattaaacagctttccactttatttttggagacgggatctctggttcaacctggagctcaccagtttgtctcgtctagctgccagcttgtccttgggaccggccccttcttcctgcccctaggattacaggcagactgcctggcttttatgtgggtgctagggagtcagactctggtccccaaacttgtgcaacaggggatttatttatggaggcatcttcctagcaccatagatcattttaaaagattttattcatgtgtatgaattttcccctgcatgtatgtgtgcggggtaccatgtgtgtgcagtgcctgtggaggccagaagagggaatttcaccttgtactggaattttaggcacccgtgagccgccaagtgggtgctaggaacccagatcttctagaaaagcagcaagtgctcttaaatgctgagccacctctccagccccaccataaataactaaaaattatttagcctgcttgtttggttttgggggacaaggtctcatgtagatcagattgatgcagaactcacgatgtcgctgagccacagtgcctgaatggagttaactatttttttgaggcagtcttgctatataccctgcccttaaatgacctaagtaaacaaagctggccttgaagttgcagcaatgctcctgcctctgcctcccaagtgctaggattacaagtatttgacaccatgtccagatatagaataaatttttttagacaaggtccgactagatactatatagacgtgattggcctcgaactctgcctactgagtactgggattaggtaggttcataggcctatgctcagcctaaaataatcctcagaatcatttgtctggcagaacttgtgcttgtagtcacgggcctttctcctttgaacacaagcagagttggcatccagtggctagtactctttagccagtcatcaggggcaccagacctcacactttctgtgcgtctggtttagcacagggattagacatgtggaatctctgtccattctaccctcaggttggttacctacttactctagacaaggacaataatactatcttcagtgggttattgtaaaggtttagccagatacccacatgcacagctagctcagtgctgggtcaggttcctgtgaccacggaaaggtagcagctgttactattgatcaacacttaaggcctgtagtcccaacacttgtgggcagaggcaggaggacccccaagtccccggccaggctgtacaatttaatgggagtctgtttcatgtttgtttgtttgtttgtttgtttgtttgtttatttaggtttttcgaaacagggtttctctgtatagccctggctgtcctggagctcactttgtacaccaggctggcctcgaactcagaaatctgcctgcctctgcctcccgagtgctgggatgaaaggcgtgcgccaccacgcccagcttttttttttttaaatagaaatttaaaatttctgaaaggactgcagtatgggtcatcgtacatggttcaaattccagtgctacacaaataaacacagatttcggtagcctgtagcatccgatgaagacagcagagattggagctagagcactgattctcaacctgtgcgcctccacccctttggcaaacttctgtctccaaaaatattcacattatgattcataacagtagcaacattaaagttatgaagtagcaacaaaaataatttctatgactggggggtcaccatacatgaggaactgtattaaagggtaacagggaggttgagaaccactgggctaaaggctaattctcaaagatctacagccaactccttatgaaaataaggaggaagtaaaagcctgagtgtgcaacagagagaccttggctggttgtggatcccatgagagagaaaagatgactctcttgaggaacttatatatatatattccacacgtgagaaacccttcctaaggtctccaacacttctgtgtaagcagggggtggaggggtcggctggagcagtggctcagtggttaagagcatttgttgcgacttcagagaacctgagttggattccctgcacccagatggtggcccccagccatccctaactccagatccctagttccaagcagccttggtacactgacttctttgggcatacatgtggtgtgcataccagcatgtaagcaacttactcatagataaaatacatatttttaaaaattggctgctcttacaggggccccaggtttgatttccacaacagatttcacaacagcaaacagctgtctgaaagtttagttccagagggttggtcacttttttctggcttcctcagaccctgtatgcacctggtgcacagacatatatacagacaaaacagccacacccataaaataaaaataaataaagcttggggggaaaaaagaggtgaggtgtaaggggaaccaagtatttatgatggtgtacatctgttctccgagcacttgtgaggtagagcaggaagtttgggagttcaagattgtattcagctatgaaattagttcaagaccagctgcaaacaggactaccttagacctgtctcaagaagaaaaaaaaaaaaaagcatgggctgcagaatggcttattagttaaaggcaactgctgctcctccagaggacctgcatccagccttcagtagtcactatgggtggtccacatggtaggtgactgaagagccagagcacagtcagatcccctgaactgcagttacggatgtgggtgctgggaaagaaaccaaggccctctggaagagcaaccagtgctcctaactgttgagacaactctccagcacccataaatattttttttaaagataaattttagggctgaagagatgactgttcctgcagaagacctggatttgattcccagaacctacatggtggccaacaacaaaccataattccaggtctgtggacatctgacagcctcttctgactttcttgggcaccaggcacacacactgtacacatacacatgtgcagggaaaacactcactcacgtaaagtaaataaatctaaaaaaaaaaaaaaaaattcacgtttaaaaaaagtcagctggaagcctggcagtagtgtcacatgcctttaatcgcagcactcgggaggcagaggcagggggacttctgagttcgaggccagccttgtctacagagtgaattcgaggacagcaggacagccagggctacacagagaaaccctggatcgaaaaaaaaaaaaaagtcagctgggctgtgatggctcatgcctttaagcctcgtgttctggaggcagaggcaggcagatctctgaggtcagcctggtctacagagagatgtccaggacaagcagggctattccaaaaaaaacccatcctgaaaataaataaataaataaataaataaataaataagtccttaatagaaaaagagatgaaaatttggtctatgtgaatattaattgctgctatttacttagcattcagtcaggtgaggtattgttaaggcttttgtctataccgtgtcacataatctgagctaatatgatgaggtttatgaggtaggcactgttatcaccacaacgttacaaaagaggaagtgactggtcagagaggtaacttttcccagtgtcggttacaggatggaaagtggcggaggcggaatctgaagcgagggagggaggcagcacatcttgggttctttgttttgttttgttttgttttttgtttgttttgttttgttttgtt

SEQ ID NO: 948 - DNA, 774 bp, Mus musculus
gcagccgcctacctggagaaacctgcagttacgtgtgtggcaggagccggagtggctggagtcgcgggatggtcaggaggcgggctgaaagttggagtaagcaggaagtgaagctgtggctgccttgggtggaaacagactaggcgaagttctgctttgagaggcccaagtgctccgagacatggaggaggccagtgggagtgccggaaatgaccgagttaggaacctgcagagtgaggtggagggagtcaagaatattatgacccagaatgtggagcggatcttggccagaggggagaacctggaccacctccgaaacaagacagaggacttggaagccacgtctgaacacttcaagacaacgtcccagaaggtggcccggaagttctggtggaagaatgtgaagatgattgtcatcatctgtgtgattgtccttatcatcgtcatcctcattatactttttgccactggtaccatccccacttaagagtcccttccatcccaccctactcctcaggggtgacctccctaatatgtgccaagaggagccctctcctgtcctcctccacccaagtgctgctcagtccctgtgagggccttctgctgcatcagatgccccagacgcaccttgatcccctgggaggagacagctggactgtagctgcatctcatggtcctgagagtgggttacagagacccagaggaccctgtctgtggctgggaaactgttggtggctggtgggcaataaagacctcttggtatccctaagtgta

SEQ ID NO: 949 - protein, 99 aa, Mus musculus
MEEASGSAGNDRVRNLQSEVEGVKNIMTQNVERILRENLDHLRNKTEDLEATSEHFKTTSQKVARKFWWKNVKMIVIICVIVLIIVILIILFATGTIPT

SEQ ID NO: 950 - DNA, 35872 bp, Homo sapiens
  misc_feature (1)...(35872): n = A, C, G or T/U
ggtctcaaactgctgacctcaagtgatccacccgccttggccacccaaagtgctgggattacaggtgtgagccaccatgcccagacccatctttctttctttttagagacagggtctcactatgttgcccaggctggagtacagtggctattcacaggtgtgatcccactactgatcagcgtgggagttttgacctgctctgtttcctacctgggccggttcaccactccttaggcaacctggtggttccttgctcccgggaggtcaccataataatgttgaacttagtgcagatacccgatgggcatagcacactatagcccagaactcctaggctctagtgatcctcctgcctcagcctcccaagtagctgagactacaggcacctgccaccacacctggcttttttttttttttttttttttgagacaggttctcactctgtcacccaggctgagtggcatgatcacagctcactgcagccttgacatcctgggttcaagcgatctcctcgcctcagcctcctgaggagctaggactaggcgtgcacccccatacccagctaatttcttatattttggagaggcagggtctcactatgttgcccaagctggtctcaaactcttgaacacaagtgatcctcccaccttggcctcccaaagtgctgggattataggcatgagtcattgctcccagtctgagatgtatttcttaatccactgtcaaatactggcccaaacaaattcagtttggcttaggaaatttgtatccactcgtctaggactgctcaatattaatgcttccagtaaattcagcatttatggtctgttatgtgctaaggactgaacaagttacagagagggggaaatgactcaattgtagcctctgtcttctaggagttaaatggtaaggaaacatgataataataaaataatttagaaataataggatagtaataacagtaatagaatgtagaaagtcataaatactattaaatgagtgcaatggaagcattgaggaagaaatgaattacactagagaaatcaggaaagctttttttgagacagggtctcccggtctcacttgggctttgaaggatgagtgcagttttaaaaggagagagggaaatcacgttcttttcaaacttttttttaatttaaaaaatattttggccagacccggtggctcacacctgtaatcccagcagttcaggaggccaaggcaggtggatcatctgaggtcaggagttcaagaccagcctggccaacatggtgaaacgccatctctactaaaaatacaaaaattagccaggtatggttgtgcatgcctgtaattccagttacttggaaggctgaggcaggagaactgcttaaacccaggaggtggaggttgcattgagctgagatcgtgccactgccctgcagcctgggtgatagagtgagactccatctctaaaataaaataagataaaataaaaaaaaaataaaatcggccaggcgcagtggctcacgcctgcaatctcagcactttgggaggttgaggctggcagatcatgaggtcaagagattgagaccatcctggccaacataatgaaacccagtctctactaaaaaaatacaaaaattagctgggcgtggtggcaggcacttgtagttccagctactcgggaggctgaggctgaagaatcacttaaaccctggaggcggaggttgcagtgagccaagatcgcgccactgcactccagcctggcgacagaacgagactctgtttcaaaaataaaataaaataaaataataaatattttgtacagatggggtctcattatgttggccagactcatctggaactcctggcctcaaggcatcctcctgccttggcctcccaaagtgatgtgattacaggcattagccgccttgcccagctggagatcaaaagttcttaatagtcttgggtgaacaagagtattctgtataggaaacatacagctaatagctgggcgcagtggctcacgcctgtaatcccagcatttagggaggccgaggtgggtggatcacgaggtcaggagtttaagaccagcctggccaagatggtgaaaccccgtctctaccaaaaatacaaaaatcagccaggcgtggtggcgggcgcctgtaatcccagctacttgggaggctgaggtagagaattgcttgaacctgggaggtggaggttgcagggagccgagattgtgccactgcactccagcctgggcaacagagtgagactccgtctcaaaaaacaaaacaaaaaaaaaaaaagaaaagaaaagaaaagaaaaatacagctaataaatgagcttgctaactcagtatctccaggttttcctttcaggaccaatatacaaagatttgtgatatttagcattcatttatccataaaataggtcaaactttaggaaagaaatttctctataaatcttttccaacaaaaatcatctttctctgtactgtggagaaagcagctttctttcagacttctcagttcaatatctgaaacctttagtgagttgcctacatgtctaggacatatgtcatatactacaaagggtaccaaagtgaggactcagtccctgcctgcctttataggacttaagagtgttggaggggtcaaatatgtatgacaaagtatgtgaaagattctttaaaagaaataaaatgtgatggagatcagaacaggaacaagttagcttcagtggggaaatctctaaagcttcatggaggctatgtcttaaatgtgaatagaattgtcataagcagtgatgagtgaaggccttagggaaagatatagaaggtggatggtgtacgacgtttgagaaaggacatgtaatttggttgactggagggctgggaggtgaatctaatgggagagaagttcagaaaagcaggttgagaacagtcttggaatgccatgctaagaagtttgggctttatcctggaggcagggtggagcatacaatatgtgtttctggaagatagcaatcaaccacagaggggtagatgggaaaagaaaggtgaatttagaggggattggaattgtccagggaagagatcgtgctgctggcattaaccaggaggcaggagctggtggaccaaggaggtggtggatatgagaggcacgaccaagaatgaaccaattgcctgatttttgtgcccttgtaaaaaatttttttaaaaaagtatgaactaaggcttggtgacgaccttgcatgtgaaggatgctttgtggttcctagcttgagaagcgggtagaatgggagtcccacccaggaggaggaacatggagaaaagataaagggtttggtttgggtgttggaggtgtctgtgaactgtccagggcattggagaggcagcattggtagttgagggagaggcccgggctggagataataaatttggggatttttcataaatggctattgaagccgtagaggcactgcacttccctatagggagaccagggttttctcagcctcaaaacaattgccattttggtccagattctttcttgtgagagggtgtcctttgcattgtaggatattttagcaacatccttggcctcaacccaccagatactagtagcacccctacccccagctataacaaccaaaaatgtctccagacattgtgaaaagacccctgaaaggtaaaataacccctctgagaaacactgctctaaaacagagtggttctcttcagaagtcggaagaaagattgccaacgggccgggcatggtggctcatgcctgtaatcacagcactttgggaggccgaggcgggcgaattgcaaggtcaggagatcaagaccatcctggctaacacggtgaaaccctgtctctactaaaaatacaaaaaattagttgggcgtggtggcacatgcctgtagtcccagctgttcaggaggctgaggcaggagaatcgcttgaattcgggaggtggaggtggcagtgagccgagatagtgccactgccctccagcctgggtgacagagcaagactccatctcaaaaaaaaaaaaaaaagaagaaaagaaaaagatggccaagggcagaatctctgtgttctaggggcacattcagagaggaagagggcacattaggagacaggtgggatggccagcagcataacaggctacagagagaaggtttggagacagaaatgaaccttggcagtggtgagaacttcatgatccttcaggaatcaggttcagttgagcctcctgaatgtaccttttccttgttctccagcttttttcctctgagatataggagtaaactgcccacctggggcataaatcagaagactgggatatatgccaagggttatgtacctgaaagtttgcttggttgccttttcaggtggtaatattccctttctcttagtttctcattcagttttctccattagtgtcctttttctcttttctttctttctttctttctttttttttttttttgacggggtttcgctcttgttgcccaggctggagtgcaatggcacaatcttggctcaccacaaacttcacctccccggttcaagcgattctcctgcctcagcctccctagtagctgggattagaggaatgtgccaccacgcccagctaattttttgtttttagtagagacaaggtttcaccatgttggctaggctggtcttaaactcctgacctcaggtgatccacttgccttggcctcccaaagtgctgggattacaggtgtgagcccctgtgccccgccttttttttttttttttttttttgagatggggtctggctctggctctgtgaaccaggttggagtgcagtagggcacgatctcagctcactgcagcctccgcctccaagcctcaagcaatcctcccacctcagcctcccgaagtagctgggactacaggtgtggtcaccatgcctagttaatctttacattttcagtagagacggggttatgcggtattggccaggctggtctctaactcttggtctcaagtgatccgcccgctgcagcctcccaaagtactgggattacaggcatgaaccactgcacccagcctattcttaatcctattttgcaaatgaagtgacttgcccaaaactgcacagccaggggtagtagtgtagaagagcaggaggtcagatgtcaccctagtctttttatcacacagggaattgctaggaagctggggctttatcctggaggcagggtggagcatatttaaatatctgttttgggaagatagcaatcagccacagaggagtagatgagaaaagaaaggtgagtttagaggggattggaattgttcagggaagagatcatgctggcattaactaggaggaaggggctggcattaactaggaggaaggggctggcatggaaaggaggaggtgtatatgagaggcacaaccaagaataaaccaagatttggcccattgcttcttgggctacaactcctataaccaagcagttcagcagtttttccttacaaagtcacttcactgaatatatatatatatattatgtttgaggctggggcggtggcttacacctgtaatcccagtgctttgggaggccgaggtgggcagatcacttgaggtcaggagttcgagaccagcctgcccaacatagtgaaacctcgtctctactaaaaatacaaaaattagctgagcatggtggcgcatgtgcctgtattcccagctacttgggaggctgaggcaggagaatcacttgaacccaggaggcagaggttgcagtgagccgagattgcgccactacactccagcctgggcaacaagagcaaaactccttctcaaaaaacagaaaaagaaaaaagaaaaagacagggtctcactatgttgctcaggctagtctcgaaatcccaggctcaagcaatcctctcacctcagcctcccaaagtgctgggattacaggtgtgagccactgcacctggtctactgaattttttgagtgctaagcacagatgatgaggtaactgaggcttagagttgttatgcaagtttgtcccaggtcatgtaaatattaaggtatggatcagccaccatgcccagtgataagccacattacaatatgtattttaacatttttcactaatcacataatttacatttttctactggccaaattttaaaagtaagagaaacagggctggatgcagtagctcatgcctgtaatgctaacactttaggaggctgaggcaggaggatcacttgaaaccaggaatttgaggttacaatgaactatgattgtgacactgtactccagcctgggtgacagtgagaccctgtctcaaaaaaaataaataaataaataaaaatgaattttaaaaaataaagaaacaggtgaaattattattattattattttttttttttggagacagtctcactctgttactcaggctggagtgcagtggcgccatcacggctcactgcaacctctgcttcccaggttcaagtgattctcttgcctcagcctcccgagtagctgggattacaggcaagcgccaccacgtccagctaatttttgtatttttagtagagacggagtttcaccatgttggccaggctggtctcaatctcctgacctcatgatcggcctgcctcagcctctcaaagtgctgggattataggtgtgagccaccatccccggctgaaattaattttatttattttattaatcttttatttaactcaatatatccaaacattatttcgccacataatcaatatataaaattattattattatcattattagtgacagggtctatctctgtctcccaggctggagtgcagtggcactatcatagctcactgatgtctcacacccctgggctcaagtgatccttctgtgctagctctccaagcagctaggactatggacatgcaccactatgcctggctaattttattttattatttatttattattggtttttttttttgagatagagtctcactcttgttgcccaggctggagtgcaatggtgtgatatcggctcactgcagcctccacctcccgggttcaagcaattctcctgcctcagcctcccgagtagctaggattacaggcatgcgccaccatgcctggctaattttgtatttttagtaaagatgggttttctccatgttggtcaagagctggtctcgaactcccgacctcaggtgatctgcccatctcggcctctcaaagtgctgggattacaggcgtgagccacggtgcccagccaattttatttttttaattttactttatttttattttattattattattattattattattacttgagacagagtctcactctgtcgcccaggctgaattgcaacggtgtgatctcggcttactgcaacctccgcctccaaggttcaagcgactctcctgcctcagccttccgagtagttgggaatacaggtgcccaccaccatgcccagctagtttttgtatttttagtagagatggggtttcgacatgttgatcaggctggtgtcaaacttctgacctcaggtgatccactgcctcggcctcccaaagggctgggattacaggcatgagccactgtgtccaacagttttatttttttatagagacagtgtcttgatatgttgttgcccaggcttatatataatatttgctgagcatggtgggttatgcctataatcccagcactttgggaggctgaggtgggagaatcacttgaggtttggagtttgagaccagtttggacaacacagcaagacactgtctccaaaaaaaaaaaaaaattaactggacatggtggcccttgcctgtagtcccagctaactggggaggatgaggtgagaagattgcttgagcccaggagttcaaggctgcagtgagcttgaacacactgcactgtactctagcctggatgacagagtgggaccctgcctctaaaaaaaaaaaaaaaaagctacaggggtccgaagtttgtttaaagcttttaaaaaggcatttgtggccgggcgcggtggctcacgcctgtaatcccagcactttgggaggccaaggcgggcggatcacctgagaggtcaggagttcgagaccaccctgactaacatggtaagaccctgtctctactaaaaatacaaaaaaattagccgtgcctggtggcatgcacctgtagtcccagctactagggaggctgaagcaggaaaatcgcttgaacctgggaggcagaggctgcagtgagccgagatagcgccattgcactccaacctgggcaacaagagagaaacatctcaaaaaaaaaaaaaattatttgtgtctggatgtggtggctcacacctatgatcccaacactttgggaagctgaggagggaggattacttgagaacaggagtttgagaccagcctgggcaacatggtaagacccccatctctacaaaaagttttaaaataaattagccagacatggcggttcgcacctgtagtttcagttactggggaggctgaggcaggacgatcgctgtagcccaggagttcaaggctgcagggtgctacgatcatgccactggactctagcctgggtgacagagggagactatctcaagaaaacaaaacaaaataaacaaacaaaaaaagtgtttgttggagaagctgacatttcctccttggaactgatttcttctggaatgggtcaagaatgttcgttcccttctgaatgtccctgttattgttcttctgtcttgataaacactgtcaaggaagatcagattttctctggcctggagccaggttagtggaaaaatcctttgccttgggccccctgctctggttcactggggcagtcctctgatcactgactgggatcaattacctctgcggtagcccctaaagggaaatgcagaattgctgaactctggaagggaaggagaggtttggtgagccatcattatagacactgtgctagtggcattgcactgcacatgctatctttttgcttctttttttttttttttttttgaggcagagtcttgctcttgtcacccaggctggagtgcaatggcatgatctcagctcactgcaatctctgtctcccgggttcaagcaattctcctgcctcagcctcctgagtagctgggattataggcaactgccaccacgcctgtttattattttgtatttttagtagagacagggtttcgccatgttggccaggctggtctttaactcctgaccttgtgatctgcccgcctcggcctcccaaagtgctgggattacaggcgtgagccaccacgcccggcctctttttgcttcttaccagcaccatctgagctaagcatcagcacctgcaaactccacagaggtgaaaagtttccctgaggggcctgtaactagtaacccagaactttctgaatcagagcccaggatcacagtattccagacttcagggattttagtgctttctgccacccagggacctgggaacaagtgttatccagcaatacattttcataactgcattttgtttccctgtgagctaggcctggcatggttgatctcagtctctagaaactggagtcagatattcaagacattacaaggagatggctggtggggcatcatggctcctaggactttgggaggttgaggtgggaggatcgcctgagcccaggagtttgagaccagcctgggcaacatggtgagaactcgtctctatttaaaaaaaaaaaaaaaaaaaaaaaggctgccctttctagatcaggaggtccagcctctggaaacctcggagggctgcttgatctttcttttctaattcctgacaagttagaagacctttggcttctgagagccctattactttaagtttaagctcttgtttgggaagccactgggaggacagtgaagaatgcccgcctacctggggaaacctgagttaggtgtggctggagcgactcgagatgcgaggtgggcgggggcaggctgaaagttggagcaagcaggaagtgaactgagggccaccctgggaggaagccgactaggcgaattcacttactgaccggcctgggctgctctgagacatggtgagccaactgggaactaggaaagggctggtttaaagaggagccagagggggcttgggactgggggttggctgtgtcgggggaggagagttggtggcaaagttagagggctgggccagtgctgctatggcctctcttctttgacaacttggctgcaaatagctctgagctgtcctggcaggtgtttctactccttctccctccctcccctgacctctgtgctggtggggagctgggcttccgtgccagcgccgatgggggctccgaattccaggcaaagagttgttgtgccttcctcctccagggagcccgaggcgggtgttgtgacaccacaccaggcagcgcctgggcagttcccagttcagattccagcccagcggcagaagctctcctctccggcctttcactttatccccacacagaaacacaaaggatttgtgtgtccactgagtcctttgggtgtcctttctccattaacatggagaagagaactaaaggtttataagagaaccagaagttggttctctgtgataatgtagttctgacccatgccactggcctatttttggaggtcaagcggggaggagctaaatactatttttctctccttgttcaaaaaccttgtcatgaagcctccgagatgagacatcagccagggaggactagtcctccatttcccccaacacccaggcgggtatttttatttaatatctgcataagcaggcggttgcttggtgcctgcacgtgtcgcccagtggtggggaaagcagaagtgtgtggctcaacggctccaggcgccttctgggatacttggttgcctgttgttctgggtcacagcaatggcattgcggccagggccgtgctccggcagctggcttagagggacagatgggtggggctgggtgagggtgttctgctggccagcacagacactttcaaccagggtcccaagaaatcaggaaaggggggtggctctgggaattgtaaatagtggcgggctctgctctggaagggaacattgtgagatgctggccctgctgtattctacggccctctctagggagcaaggaagcagtggggagggatttagtgatgtgctgcttttccttgtcaggggccctaataaccccaaaagaagtttgatctagtctgttcagcatcacatctcaccttctggggcttacaaatgcatttatttttgattacagaagtaatacatgaaaacattctctttgtaaacatttcaagcattttacaaaaagcttaagtctgcctgaggccttaccctccccagatctctgagcccaagtctccagttcccccaccacttggtctaattaaccccgtgttgccgcacaggaggaagccagtgaaggtggaggaaatgatcgtgtgcggaacctgcaaagtgaggtggagggagttaagaatattatgacccagaatgtggagcggatcctggcccggggggaaaacttggaacatctccgcaacaagacagaggatctggaagccacagtgagacagggagcccactgggggctggaggaaaacagggagggagggaatttctttttggtggggcaaaatggacaggagggccagaagtttgacatttctgttgcctttcacctggtttgggagctgatgtgagctgagtctccacttctgaatctgctctgctccacagattgttatggatcccagggaatggatcccatgactggggcttgaggtggcagctcgcccatagaggcatgttctgagaccgaaagctcagtcagcccatgcattctcaggcttctctcccgggaaacttgttttccctttgaagcctgcccatgacaatcatctgggtctgaccttcccagggcagaaatattggctctgaggaaacccccgctgtggcctctagccttctctaggagctgttagacaaggggtgggaaattgctggcgtcttgctgagtaggctttaaaaagaagggggaaagagcagtgaaatgctttgatcccagggtcccctgctagatgaaggctaaaataatatctcccacacatcttgctagacctcattcttctctctctccagccaggggctgaggccagctgtttcagggaggaagtaactccaaagttgagcaaagtctggagcctcaagttctgtgttcagcggggaggctggctctggctttctgagtcctgtgtgaactcttggctcttgggtattgctcccttgtctccctggggctcattgcctgtttctgtagcttaattgtagcttaatttggggagcatggccccgggaattttttttttttttttagacagagcctcactctgttgcccaggttagagtgagtgcaatcttggctcactgcaaacttcacctcctgggttcaaacgattctcgtgcctcagcctcctgagtagctgggattacagtgtgcacccccacacctggctaattttttgtatttttagtagagacgaagttttgccttgttggccagggtggtcttgacctcctgacctcaggtgatccacctgccttggcctctcaaagtgctgggattacagacttgagccaccatgtctggacaagccccaggaaatttagtgtctataacttgaattgctgggcatggggaagagtgggtggaggaggaggagttcccttacttccaaccctctatcctgtcctggtccctcctccagcctcagcagtcccgatggggcaaggagtcctggagctgcgagatgtgcccacctggagcctgcacccctcagtcccagggtctgccctcccaagggcagattttgctgccagtgttgtacccttgggtgtaagcaggtgtcgaggacccctcagtgtgcaggggtaagaagagaaaggggacccctagtcatatctaggtggagacctcctaggatcctgagaattctaaatttcaacccggccttccagatttttaggaaggtacatttgtcaaggtaggcagatacagcatttttttttttttttttttttnnnnnnnnnnnnnnnnnnnnnnnnnnnnnnnnnnnnnnnnnnnnnnnnnnnnnnnnnnnnnnnnnnnnnnnnnnnnnnnnnnnnnnnnnnnnnnnnnnnnnnnnnnnnnnnnnnnnnnnnnnnnnnnnnnnnnnnnnnnnnnnnnnnnnnnnnnnnnnnnnnnnnnnnnnnnnnnnnnnnnnnnnnnnnnnnnnnnnnnnnnnnnnnnnnnnnnnnnnnnnnnnnnnnnnnnnnnnnnnnnnnnnnnnnnnnnnnnnnnnnnnnnnnnnnnnnnnnnnnnnnnnnnnnnnnnnnnnnnnnnnnnnnnnnnnnnnnnnnnnnnnnnnnnnnnnnnnnnnnnnnnnnnnnnnnnnnnnnnnnnnnnnnnnnnnnnnnnnnnnnnnnnnnnnnnnnnnnnnnnnnccagcactagggaggctgaggtgggaggattgcttgagccctggagatggaagctgcagtgagctgagattgtgccactgcactccagcctgggtgacacagccagacactgtctcaaaaaacaaacaaacaaggccaggcgtggtggcttacgcctgtaatcccagcactttgggaggccaaggcgagtggatcacctgaggtcaggagttcaagaccagcctggccaacatggtgaaacctcctctctactaaaaatacaaaagttagctgggcgtggtggtgggcacctgtaatcccagctactcagtaggctgaggcaggagaatcaattgaacccaggaggtggaggcagcagtgagccaagatcgagccactgcctgagtgacagagcgagactccatctcaaaaaaaaaaaaaaagtatggcctgtgggctgcacttgtactcttataatcttgttccagtgggaggagccactgggtcactcactctgccttttccccaacagtctgagcacttcaagacgacatcgcagaaggtggctcgaaaattctggtggaagaacgtgaagatgattgtccttatctgcgtgattgtttttatcatcatcctcttcattgtgctctttgccactggtgccttctcttaagtaacagggaacctctcccacctgcccttctcttcagggacaaccctccataaatgtgtgccaagagggtctcctttcctgtcttcctctacagagaatgctgctcggtcctcctacccctcttcccgaggccctgctgccatgttgtatgccccagaaggtaccttggtcccccggaaggagagaaaaaagagagatggactgtggctgcatttcttgggtccttagagtgggctggagagacctagagggcccagcatgtggctgggaaactgttggtggccagtgggtaataaagacctttcagtatccctatatgtgtgaggcactttctctcttcccattttgcctttggcttttctatttcttttcttcctgaggataccttctggctaaaattctctcatctgaggtccaagttgttggaagggcaaagagtatatgtttggagaagaaagttggagcccccaccctgtctttattcctcccagttccattcattgtcacaggtctcaagaacaagaattttctgggagtcttggcatatggaaagttcaaaaccttcatagcattttggggtggtatgcaagatttttaagtgttcccattgggtcctgccatggccctgtagtactcttcttctggaattgttagctgaggcatgaagctggttgaaatcctcctgcctcttccaccagagccatctctcttcaacgaccctgtagtctagagccgaggggtggaggaaatggactgctattcctttccttgtgcttctgcatgttttatttgtcttttctctgtccttgtcttctgggacttagcaaggcctctgggtctcagttgtcctgagggggcaagcatctctccttggcatcccatggctgggcacagtcagtcagtcagtgtcacaggacagggccaatggctcttcttcccctctgtgcacaataagcctttctgtcttcaggcccccctcctccctaccaggttccaccatcactgtcactttttccagtgcccagtccgccttggtttgcagggagggttcttgctatctctgttcctgtttcctccacaggctttccagaattggaaacaacctgttgtcaggaagaaggggaagggttgagagtcagggtttgggactagattggcaagtcaggctctggaagaatcatgctctgaaatttggggagggaggaggaaaggtcagaaaagacccttgtgatatttttatttttattttttcagagataggatcccactttgttgcccagactggagtgcagtggtgtgatcatggctcactgcaacctccatctcctgggcttaagagatcttcctgcttcagcctcccctgtagctgggaccacaggtgtgtgctaccacacctggctaatttttgtattttttgtagagacatggtctcactgtgttgcccaggctggtctcaaactcctccgctcaagcaatcctaccaccttggcctcccaaagtgctgggattacaagtgtgagccactgtgcccaggcttggggtagtctttgctacaacatgttaatcctctctctcctggattcaaggtgtaaggaactgaagtgaagcttctgccttgggacccaggctgtccaaggtgggggtgagtgtctgtgaaaccctcttggtctgggacttctgtattcacagaggctcagccccagagagggaaactttcaattctgttggtcaagagaggcctcacttgagggaccaggcccagtggctcacacctgtaatcccaacactttggaaacctgaggcagaagaactgcttgaggccaggagttcgagaccagcctggtcaacatagtgagaccctgtctctctcaaaaaaaaaaaacaaacaaacaaaaaaaaaaaaacgagggaccttattttaagatgtccgaggcagcttggagtagtggagaacaggtagctggtggtttctctgtagcagtgagaggacaggatgggtagattcggctcaggaaggctctgaagtggtagtagatacaccagcctcccccatcctctgactgaggagcaagtgcatggcgggtgcatgacagcacagagctgcacttgccctcatggtgaggaaagacatacagaaaggctagagctagtactttgcccatgtggggctgctttctttttgaatagaggtgaaagtcacacaatgtacagtttgttattttaaagtgtacagatcagtgacatgtattcagaatgttgtgcaaccaccacttgtctttagtttcaaaactttttgggtgcctgtttttggttctgggtgagatgcactcaccagggtgataaagaccctgcctggcttgttcatggcgtctccaggacctagtatggtgcctgaccgtggcactcatagggtgtttgttgagtgaatgaatgatgccttttcagctgaactcgagctagaagactccagggctcactccactgtgcccattccacagatccggccccgaggtgtgcccgttcaccaggcagaggtgtcatccgaattcaggctcctggggcccgggagggtccgactctacggacccaggtcgctgtggcccatcgctttcgatttgacttggtttctgtcgccactcgcggaaggcgcgccccccgccctcgctcggcggcccgccccgccccgcccctgctcttcctccggggccgctggcactgcggccgctccgcaggcagagaagccgggagcgggcgaggcggcggcggcagcagcgatggtgagggcccaggcggggccggccagccctgcgacgggcagagggcgagtggcgagggtgggagagaggagtccaaagtccgcgggctggggcctcccctggggcccacgagggccagacctgaggcggtgaccactgctggagcaggacggggcggaccctccactccctgcgcgccgcatgggagagaaatgcgtgagccccgtcctggctgcaccgcgcagagcgagcgggactcgggctccccattctcctgaagcaaagcggttaagagcaccgactttggagtcggactccgggctgggatcccagctctgtgacccgggacaagtcacttaacctccctgagcctccttttccgcgtctgtgaagtggggtcagtaatacctgccttgttgggtccttgcgaggttaaaggagccacagtggcagagacccgcctggcactcagaacccactgctaagaagtggtaggaaatgtaacgacctcgtcagccctttccgcagctgtgaggagccaagcctggctcaggagttggaaacttgagcagatggggtggcagaggccattccagccccatggcagggtgttggagggcgaactcctcccctagagaaagagaaagggagatgtttactctgaaagttccactgaagttatcagtgtatggcacaggcctgactccctgctaacctctacctagtgacacattcctgagttgagtcatccccactcctgctgcagatcctggcctttgtcctcacttgccatctccaaggcaaagatgtcaggaacagctggtgccagtttctccctttccctagggctcctgggaaaatggactgggcaggaagtaggcttggtgctttaagattttgccttggagaaactgacagaggtgtgatggatgtggcctggctaggggtcaatgcctggatggccttatctccagggaacttggaggcaggaagaggaagtggggcaggaaggtagcactgagctctgaggccaggccaggaagctgaggaaggctctgagaatagggcagagcccagagcccacttaagggtgtgcagggcaaggggtcaggcaggggtaggggtgggcttcagccggcccttagctctttgggagaagctcctgaagtgaaggctgaaggcaggatattttattgggggaggaggatactgggaaacctggggattctcacgggtacatttgaggcagtctgtggaggagaggctggggaggtcgctcctccacccatccatctcctagcctcttcctgtttcttctttcactcttgcccctttagcgctttccttccttccacccatcccctttccctccctggtccttcttcctttcacttttcttttcttctctatgactcattcaaccaacaaggatttcttggaaatgtccttcatgccagcatggtgacaagtataggggacagagcaggaacaaagcagtgatgggaaagatggaaatggaatgaataattacttgaattcattaatcttgtagatgatcctctctccaaagaatgtgtgtgttgagccacaggcctccctcatatgcacacaaattaggttggtagcatcaaccagattctttagccaatcagctaaagtgtctgacctccttgtacctgcatctaatttagcacacgggttacaaatgtggtgcctggagtctgtgttggttcaactcccagatcttctactcactggctctgtgatcttggacaggtgatttaacacctctgagccaaagtttcctataaaactgggaaaaggccaggcgcagtggctcacacctgtaatcccagcactttgggaggccgaggcgggcagatcacgagttcaacagttcaagaccagcctggcaaacatggtgaaatcccgtctctactaaaaatataaaaaaatagccgggtgtggtggcacacgcctgtagtcccaactatgcgggaggttgaggcaggagaatcgcttgaacctgggaggcggaggttgcagtgagctgagatcgcgccattgcactccagcctgggtgacagagtaaggctgtctcagaacaaaaacaaacaaacaaacaaacaaaataactgggttaataatatggccttcaatgggttgttgggtgaggattaaatgagacagagcaaatgaacagcaagcagcatagtgcctacctcagagtatgtgcccattggatggtggctgttattcttgctcaagatgtaaaacctcaacagcctgccgtgccagatgaaaataaactagatgcagccgggcgcggtggctcacgcctgtaatcccagcactttgagagagaggccaagccaggtggatcacgaggtcaggagttcgagaccaccctggctaacacggtgaaaccctgtctctactaaaaatacaaaaaattagctgggcgtggtggcaggcgcctgtagtcccagctaccctggaggctgaggcaggagaatggcgtgaacccaggaggcagagcttgcagtgagtggagatcacgccactgcactccagcctgggcgacagagtgagacaccatctcaaaaaaaaaaagaaagaaaataaactagatgctagttaccaagttaccaaaagcccatttaaagttctgagccacaggttagaaacaattatgtgtactatgtgtacaagtttgccatagggaagagcttgcttggctgtgcattttataaaacgaagaggttttactgaccacctgtattacacaattttttttttttttgagacagaatctcgctctgtcgcccaggctggagtgcagtggcccttagttcactgcaacctctgcctctcaggtttaagtgatcctcctgcctcagcctcccgagtagctgggattacaggtgcccgccaccacgcctggctaatttttgtatttttagtagagacagggcttcaccatattggccagactggtctcagactcctgaccttgtgatccacctgcctcggcctcccaaagtgctgggattacaggcgtgagccaccacacctggccatattgtacaattcttgagatctgactgctaaaaaaaaaaaaaggagctagggaaatgtgggccacatcaatataatagctcttatttattgagcatttagtatgtgtcaggcgttgtgctaagcttttgatttacaataagtcacataatccttagctaacattattatcagcactttacagaagaggaagtggaggtcagaaaggtcatatcctcagtctcagtcactcagctggtgagtggcagaagcaggatttcaacagacgggtgcaaagcagagccctgctcctagtctctgagctgagtgccgacttagggaggcaatgttataccggtacttgcgcccattcatctgacgacagttagaacagtttcttggatactagacaggagatggggagacaaggagagttaggatagggaggtttttttgtttttgtttctttgttttttcttgagacagggtctcactcctttgcccaggctggagtgcagtgcgcaatcttggctcactgcagcctctgcctcctaggttcaagcaattctcctgcctcagcctcccgagtagctgggactatgggcaggcaccactttgcctggctaatttatgtatttcttggtagaggcatgatctgcccaccttggcctcccaaagtccagggattacaggcatgagccaccgtgcctggcccagatggtgtggttttgagaactgcgttttcataggaggaatcaaagagattgagcccagaaaaacctgagaggtttgagtgtcatagaggggatattctgtacagggggcaacagtctgtcaagaacatttcctgtgtaactgccactctctggcaattacacaactgctcccctctcgccctggctcaaaattccaagccctgcaggcttctggcctcaggtctcagaaatgcctgtctcacccttcttcctttctccacgctctgcttgtcacccctctcccgcctggtggccatctcctggcagtcttgctgatggtacttctccacccctctggctggcctctctgccattttcttacttctatctgtgcctgtctaccaccaatagagaaattatcctgaagcacttcttcactgtcacccgtggctcaaaaaccacactagctcttaagttttatcagtcgcttggagccagtcttctctacctgaccttttctgccttctgtcctgccccatccctcccatcctctgcctggtcctcactgtcagggtgtatccctatctctcagtgcaagaatgtccctgctccatgtcatccttcaaggggtcacccgcccccaccatggcaccctctctgtggcagctctgatacttactatctgtatcgcacagtgtaactctttactcttctctaattgtattacatgtgtcttttccccagggcaaagtggtctctttaagaataggcacaattaggccaggcatgatggctcatgcctataatcccagcactttgggaagctgaggtgggaggactgcttgagcccaggagttcaagaccatcctgggcaacatagcaagaccccatctttaaaaatataggcaccatttattcaggaactgtttatcacatctctgctgtctgcagacattatgctgagtgacagtgtggcgtaaggcagtgtggcccttgtcctcttgcttacctccttccagggtccctggagctttatttctcacagtgccagcagagacctgtgtatatagtcagtgtcctttttcctctggttgagtgggggccaaggagggcccgagacttgagtctaaggcctctgtgttccctggagcgaatgtgttcttttaggcctgggtccatcttggctccaggcaggcctggcttcgcattgggggagactggtccagattacagctggaagcacagccagctctttggagaatgtgacccaaatatcaccccttgttgaaaaataaggtaacaacagctgtagcatttagaatagaaaataaaaagataatatccagcattttcccagtctctagcagtgactcttattttcgagtatttatccattctcaagtttttgctttggactatttaattttgttttttgttttgttttgtttgctgagatggagtcttgctctgttgcccaggctggagtgcagtggtgtgatctcggctcactgcaacctccgccacccaggttcaagcgattctcccatctcagcctcccaagtagctgggattacaggcatgcaccaccatgcctggctaatttttgtatttttagtagagacagggtttcaccatgttggccaggctggtctcgaactcctggcctcaagtgatctgcctgcctggggctcccaaagtgctgggattacaggtgtgagccactgcgcccagcctgccttggagtatttgaatgtggggaagttcaaaggattgaatgatggagccttgttgaatgctatagtagtaataatagtgatgacggttgactcaggaaaaggtgagagtgcagtttccctgctctcttcgttgttcctctgtgtttcctgcttactgcttcctccagcctgtgagcgcagcctcccctacagtggtttgcctgacctctcttgaagcaggttgcttttctagctcatgggtaaatattgacctatttgggtttcaaatgcctgcccctcgaaactcatgcagggctagaaaaacatgctgggagaacatctcttgagaataagaattgcttttggttaggctgtatcgtaattggcccactcactgattccttgcttgcaatggtcagcactgtgctggcctcccggtgggatggtggtggacaaaggcagggcactgctccctgccctccctctgggagtttgtggtccagctggggagataggactcatacagtgggaattcttggaggctgtataccaagcagctgcaaggatcctgaaggaggattcttggctgagtgggaggtagccctctgtgaccaccagatctcttctaacacttaagttttctggttttaagtggaattcagtcaagtgccaaaatgtctgttgtagacaatgggtgacgtgggctggcaggaaaagaagcttgcccttcttgtaaggaggggaagggaacagggatgggctgtggggaagtaggctaagaggaaggagtttctgtggtttgctaatccactggtattcatctccctgaaatgtccctgctcctaggcttctggcttataccagggcctcctgcctggtgtctctctctgttacgtgcacccaaagcccagtgcctttcttgcacatgacccagactttctctctcccctgtcatttcaaccttccccagcttggatccaagacctcccttcccagtcctctgaaatgagctggtgttttctgttaggcaaagctgccccccaggctgggaaatccaagagttagtctcatctctgtaagttggaccccagtgaggaccccagctgagtggaaggctggaggccaaaaaccggtaccactgaggttcccagacggagagggaagttggagcagtgatatagggagcaggatcaggccaggaggcagaactggcctgaccagtcagaggcccaaagaggaagatctgagcttctcagtttggggatagaggggttaggcagagactatgatgtgtgctgcttcaaaattacctttctagcctgtagggtaggtctcctccctgtgtgttccagccaggtagcttggttacccattctttgctgccttcttaggccagtgggaaaccttagggcagctgtgcattgattgggtagacgccattctggagcaggtgagaaaagaatcagctttgtgggagggtggggtcctgggaagatcccaccttgggacagcttagaggaagctgaggtgctggaagccgggacttacctaggtcctaggccctgccttgacgtgcaaggggaggagcctgtgagacttaaggtgtgccgcactcaccccgaaggccagaccttcactccgcacacatcatacccttacacgaaggatgctgttactctcatgctgtacccacctacagggggagaaggaggcttctagatctcaggggcagatgagggccaggtgggggcctcatgcagccctgacctcgggcttggtgtccaggcaggaatagagttggagcggtgccagcagcaggcgaacgaggtgacggaaattatgcgtaacaacttcggcaaggtcctggagcgtggtgtgaagctggccgaactgcagcagcgttcagaccaactcctggatatggtgtgaggcctgggggagcatggaggggaggggagaggattgggaaagtctctcttgggctgtattcaggatctccagttccttggtggggttgaggccttcttgagggccagtgtggggcctctgggtttcctcaggcacccatagcctagacatgcaacagatagaccccacaagataagaaggccttggtttgaagctgtggaccttcttaaaggtagaaaactggtatcgttttttgtttcttttttactttgagacagagtctcactctgtcgcccaggctagtacagtggcacaatcatatttgctgcagcctctacctcccaggcttaagtgatcctcctgcctcagcctcctgaagagctaggactacaagcctgcaccaccatgcctgtctaatttttgattttttgtagagatgaggtctcaccatgttgcccaggctggtcttgaactcctggatccaagagatcctcccaccttggctttccaatgtgctgggattacaggcatgagccactgtgtccagcctgagtactggcattgttaactgagggtgagacactagggctgaaagtcaagggccacaccggtgtttgagatgagtcaggctgggagggttccacggcaggtggtatagaaagagagcagacaaggccgggcgcggtgtctcacgcctgtaatcccaacactttgggaggccgaggtgggcagatcacaaggtcaggagttcaagactatcctagccagtatggtgaaaccccatctcaactaaaaatacaaaaattagccgggcgcagtggtgtgcacctgtagtcccagctactagggaggctgagacaggagaattgcttgaacccgggaggcagaggttgcagtgagctgagattgtgccactgtactccagcctgggtgacagggagagactccttctcaaaaaaaaaaaaaaaagaaagaaagtagacaagatggggaggatgcaggaggagactaagccttactgagatggggttgggaggagctggctcccaggccaagagggtgccagctaactcccactttgtgtctgggggtatccgcagagctcaaccttcaacaagactacacagaacctggcccagaagaagtgctgggagaacatccgttaccggatctgcgtggggctggtggtggttggtgtcctgctcatcatcctgattgtgctgctggtcgtctttctccctcagagcagtgacagcagtagtgccccacggacccaggatgcaggcattgcctcagggcctgggaactgacccagctggtcctgaaggagaagccaaatggctgcactggccgattctggtctccagaggaccttggtgtttgctctcccttgacccaccccagtgagtgccaaagggcagccccaacatgtgcacccctgcatttcctgtcatgccacagactggcccttgagggcagcctgctgtactggccatgctgggccagccccacctggagctcagtaaaaactgctgtttgattaaaagctggtatctgtgtgtgaaggtccccaggttggttaatcccatctgtctctacccctagggctgcttaaaaagcccatcacccaaaggactccacccctgggagatggctccttcctctcccttccctacttgatccagcccgacacagacagggagtgtggatgcaagaacacaatggcccccaaagcagacccttgaaccagtcctccccatctgagcctgtttctctgagaatgaaatctattatttttctgtcatcttggggatgcttagaggaccaatgagactgtagatgcgatgacaaagaagaaagcacttcaccaattttttttttttttttttgagacagagtttttgctctgttgctcaggctggagtgcaatggcactatctcagctcactgcaaactccacctcctgggttcaagcaattctcctgcctcagcctcccaagtagctgggattacaggtgcccaccatcacacctggctaatttttgtatttttagtagagacaaggtttcaccatgttggccaagctggtcttgaactcttcacctcaggtgatccacctgcctcggccttccgaagtgctagaattgcaggcatgagccaccgcgcctggcccaaaaaatttttcataaggctctcaccttcagataaatggtttcccctctgaacacttcccactcctcaatttctctttccacattctatctacctcaagctttacatcagactgcagatgggggaagtgacagcaagagatggggaccttaaagcactccttggtattcccatctccctccctcccttccttcctttttcgacggggtctctcctgtgtcttctctccctccctctttcgacggggtctatgttgccgaggctggtctcgaactcctgggctcaagcaattctcttgcctttagtgctgggattgcaggcgtgagccaccatgtccagcctgaattcaggcttttcaaagctacagggccatataggccagggaggcagtgccttcagggccatagcaaagatcattgggcaaaggcatggaagaaggaaataaagccacaccaagactgtggaaacagggcagcctctgcctgggctacttagctgcagttcaaactcaggtgtgagtggcaaggggaattcagggtcaagtgtgtaaaataagcagttccttgctgggtaaagtgagcgctactgacagaaaccagaataagcctgagttgtgtggagcttcaccccttacagagcgtgttagttttactgagcgcattagcgtcttcctctcttgggaaagatggaggaaagcacttggccctgcagctggtctgcaacaccacttacagactgcaaatttgggcaagccacttctgaggtaaaaagggcataatgacgcttagctcctgggtctattgaggggatgatcgagcgtgtaaaacatacatcagactaacagttctagatgctaaatagtacctatcatccaaatcattgagtgcagtggttcttaaacctgcttcacctgcataatttatacaagtgccattgcccaggccccaccacagatcagttaaatcagaatcttcgaaggtatcagacacgggtgtttctaaagctcctccgcgcccattctctcctctgggaattcatgtgtagccaggaatgaaaaggtcttagtacaagccagcagttttacagaagctagggatagcaacgggctgaaggtaacagtcccatgagctggttgaggccccaggttctccggcaaagagatctctctcagttggggaggcttgccccaccctttattattatgcctaacacataagaaatgcgcaggaatcaaacgcaaactggtgaaccaactagagggccgcgggggcagaagtgtccggcggggatccggacagcgcatccggaagcgccatgggccaacgctcgcaggaacctgaacccctgggccagcgccgcctttgctcgcagaggcctctagcatctgtactgtcgaagccctctgagcttcagggcagactgaagagccttacacaccagacacttggacgcgatcgcgccagaaatccccgggaattcagtcttggctccgactccaaaacaaatgattcctcaccagccagatctccatcattggcgttagtctctggtcacctgacttgttcaagccaatgagagggggccgaattagtacttccgctttccgtgctgtttaacgagccactatgcccgtccctcggatactctgattggccagcctctctcagctcgtcagtttattggccagcgccgctaggccgctatcgagcagggtccgagggctgtgtcagaaggctgggcagccatggcgtcctatttcgatgaacacgactgcgagccgtcggaccctgagcaggagacgcgaaccaacatgctgctggagctcgcaaggtgggtgcgcggggcttggggatagggtccaaccagcaggtttctgggctggggctggctggagaaggcggattaccaggggcagcggattctggggaggacagatgagtaatctggagtgttagtacgggcggcgagactgaggggtgtggggatgagcatctcgataatttgggccgtccgttgggccggcctggggcaaggggattgcgggaaagattggagctggagagtggtgggcgtgggggcggaaggacagcaggctctgggaggtctcagagaaggtgaggcatgggggcggggttggggccgtgtgctgtgagtgggtatattcatcagtaacagcaggcactgctgttactggacctggaatctggcttggtcttggaatctgggctctaccaggttattcagcgtagcctgagtaacttctctgaatctgttgcctcatgtgtaaaatgggaataaacactttacgtgctggggcggtctgatagcagttgtaaactatttcccatcgtgctttttatctagtgagcatctactaactactaagggtagctattattcctactagctgggcagcgtgtttattaatgtccagtggattatggggacaaagaaaaagcatagttttcctttgttctgactttacatccccttccccaggtcacttttcaataggatggactttgaagacttggggttggtagtagattgggaccaccacctgcctccaccagctgccaagactgtggttgagaacctccccaggacagtcatcagaggctctcaggctggtgaggacactgattctttctgctatttgggccagacccaccccttccccaagccagactgtggtctggtccttcagttttccaggtcaggtgggggcaagtgtccttcaggagtgggagcttgggaggcagagcctgtagcagctctcctgatcagcactccttcctaaagagctcaagtgccccgtgtgtcttttggaatttgaggaggaggagactgccattgagatgccttgccatcaccttttccattccagctgcattctgccctggctaagcaaggtactgcttctcttcttctagctctcaccgtgccctgggcccagtactcaagcttctttctgttcatggactgctgggggatggaagaagagtggcagttgggagcaggggagggtggttatcagcttatgaagatcagaccaaggctagaacactactctacttttctcagacaaattcctgtcccttgtgccgctatgagctgcccactgatgacgacacttatgaggagcacagacgagataaggtaggggctgatgcttaagtggaggggtcgtaatgggctccctgagtcctgtccccgctgccatcacttcccacctcagcaggactgggtaggcctcagaatccctggctctggctgtcttcttagtgactttgatttgtggtgagagcctcagcaatgcagacgccagaggcctgaaaacagagccagccccataatagctgcccatcccctcacccataggccttcagttttggcccctgcccagcatgccttctttccttcaggctcgaaaacagcagcagcaacaccgactggagaacctccatggagccatgtacacgtgaggaggttggggctgagtgctggccctctgcgtcttccttattaaccttgaatcctcattaaaggtttctttacccaccctgaggctgtattgatcacagacctggccaggggctctgcatcctccatcaggtctctacttctgttggggaaggtgatcctaaatcgcagaaggcaccaggctgcggttttcctccctgctggcccatctggactcatggcagtggtaaagaactggattactgcaatagccagggcttgggcctatgtgttcatggttggaaggcaaaatgtgtcagggtctggtacccagttaattacttaaagctgataaactaggctgggtgcagtggctcatgtctgtaatgccagcagtttgggaggccaagacaggtggatcacgaggtcaggagttcgagaccttcctgaccaacatggtgaaaccccgtttctactaaaaatacaaacattagctgggcatggtggcacgcacctgtaatcccagctacttgggaggctgaggcaggagaattgcttgaacctgggaggcagaagttgcagtgagctgagatcatgccattgcactctagcctgggcaacaagagcaaaactccgtctcaaaaaaaaaaaaaaaaaaagctgataaactagcctgcaccctcctcccactgcaatgtctagttaactttgtaatcccacaggttttctttttgctccattgagaaagccacttttaatattttaaagttgctctctgtaccacccccaccttccccccatgcctcctaaggaatcaaagttcaaaccagactctgagtgggggatgggtgagattatcagaccaagttagttctttagattgcttagaggcccagaagggtttcaagccctttgaaggggtatttgggtggcacctggcatcctttgtttctggcaacagagtgcactcagcactcctggggggcaagggcttcctcccatccttggcttatggaaagccatcccagatcaggccccccaactctccagaacaggctacaaacatgcaaattagaattcttttaatataaaaaaaagtactaaaatacccacgtggttctgctgtgttatttgccctaaaggaagtgaggggcagagtgaagaatcccagtgcagctcagtgggcccagaaatgggcctttccgtaggctaaggcgtgcccactccacctccaccagacttctatcccctctgctgttcccagcccccaattcctgcagcaggaaaccccagtggtctggctttggcactgggagtagaaggcacctgaagggctggctgggtgagtgaggacaggtgacctttaaaaacaaaacgacaccgtggggtggggaagcaggtcatgcagctgtggcagctggcagggcccactcctccatggcacaggtgggcatgggatggccacttctccagaagtgaggaagcccagatcccaacagaatactttctcaaaattgtttttggtacgaaataaatggaaagaagatatggggtggggtgctgtggaggccgggccagccaccctccccagaccttagatcatagcgatgctctcgggggcacagttgaggtgggtggaggtgctgctgctcccggaggacttgcaggcccggccaggggtaggctgcagtgcagccaccagtgtgtctgaggagactgccccaaactcgtagctgaaggtgccatagaaaatgaggatatcgatgacacacacccactcacacagggctgccccatgttgcagctgagaactctcatggacaaagaagactccacctaaaacgaggctaaggaaatgttcagtaggacatacggaaacctggcaacaccccttctgcagtctcaggcctcacctctccaaagggagaggtgttagtcctctcccccacatggcagtgttaggcctccaccccccatcctcttgggagggagaaaggttgagctagaggatgagttcctggctgccccgtcctgaaaggatactgaggaccagggtgataaaggcgatgacagccagcacacttcgcagataggccacagccaggtccagcggggcggtggccccttggtaggagagagcacagtgcaggcaaacaaagagcagccccgcagggaaggccacgccagctccaacgtagtgcagagacctggcatgatccacctgggcccagagaagggccagttggtgatgtggccatggccccacctctccacccctccttcaatgaatctcctctctccctcttccttcctctccctctttccagccccaaccttgaggtgccacactgcaggcagccaggccttgttaggtaaagtttaaggtttgcaggggagaaggggaagcacctgaaagttgccaaccaccaagaggcccgcagcgttggtgcagcctgtgatgagtgccgtggtgttaacccaagagtgccgactctgctccaggagctgcccgtagcgcaggaggcagatcagggccactgggggaggagagcacagttgaggccttcctccagccctggccctgcccagcgagcctgtcagcttcccccagacgctgtggtgctcctgccccttctgaggggcagaaaggaacagacaggcgggtggtgaactaggtttcctcaggctccagccagcagggtggctgtgtgggagtcagcttttggccttcaaggaaggggagaagctgcctctattgccttagcccttggtggggagggctgcacagaagggcttcctgggcctttctgtgtggggatcactgggctgggcacgcagggtcagggctaagggtacaactcacccatgaaagcacccatgttgccaatgaggctgaagaggcagctttctgggggataggagccacacttgctgcgaggagggggaaggacagagtaagaggggtgcaggaggcccggggggcccccattttggctcactggctctcccctgctttacctgcacctgctccttagcaggcaggccactgatttatgtgaagatccagggtccctcatgaacaactggttccaggctgggcccccaaagcagagctcatgtgtgtgagagagaagggagtgcccaggagtgttcgggcaaccctgacactctttgctgagccctgcggctggtttggctatccttgagccagaacacgggctgggcaatctgagggctccagcttaaatccaggtgcctccgcttattagctgtgtgacctggatgaggaagactgagcctgtttcctcacctataaaatggtgaaaacaatacctgcctcactcctgggaggatgaaaagagacaatgcatataaagcactcagcagagtgcctgccccacagtaactgtcaagtagtgttgttattaagtggctcttaggatacttattgttcctgagacccaaggacagctctttgcttgaggggctgtctgggaggcccttagatctccctgaccggcccaatgtccaggccttacctgatgagggggacatcgtccagggtgcagcaggtcttgggacccccttgctcagcagggtcaggagggcaggactcgttgtaggacctggcaggcaggacagggagtagactgggggaagggactgcccccaggcccttggcctatagcctcaggcctcaaagaggactctctcccagacctcccctacagggacagaagatcccactccccagtgcccgcctgaagcagtaaccaaaggggcaaagggatagtgggaagtgggtaggtggcaagaagccatgcctggggaccaatttcagagaagagcagtgaggctcagggttgcagtctggctcgtggcagcctcaggcccaagaggggacagagatgaaggaagctttagagcaaggttgtctgcagagtccttcataccagttctccacagggcatacatggtggttcatcacagccatggcatacctgtgggaacagaactgtcaccctggcagccttcccgagccccactcaacccaccccatgacccttctcttcaaccttgatttctggccccattcagcctcattattgttgctggggactcaagttgaggtccctaaggcttgatgccacaccagcacctgcagcatgcccccagctacaggccctctggaaattgccctggctagaagtatatttgtcagggccaccctgctggacagcagtggtgccagcttgtcccaaggggctgtgtgcccaggcaccaagtcaggcttttgagacacccagagtgaccctgggtaccaccgtggctatgacaggacaagagactttgtgtgcgtcatcaagctcctgttgccccccgggcacccccctttactcacacagtccatatgccagtgatggagaacgctgacaggctgacaggcaggaggatccaggcggtcatgagggaggggagccagggtggtggtggtgttggggggaggacaagaggtagatggggaagtgggggcggaccagctaccttgagatgtttctgccacaaccatcagctgtcctggcctggtggagagagatcaaagtccaggagtgggtaactggccgggaagggggaggggaagggggtcaacaccttatccagcgctcccgttgggtctctgagcgtccaaagtttgggctgagcccacggcagaacgtgaacaccctctggcactgggggcctccgcggtcaacccaaatgccaccggcgtgctgagagacgcaggcggaccgtaacatctggaagggagttaccctccttctgagggaccagggctgggagaagggctggacaaccgaagaggccacgccaaggagaggctgggtgccggcccagtggagcggtggcgagtcggcggcgcgcaggcaaccacctgaccatcggcgccctgggcgaggggcgggttcacgcggaaagcccagcccggcccggcccccgctcgcctgggcgcggggaccccggctggggccggaccctgcggccggcgaccccccaggacccgggacgcgagagtccccaggtgattcctggaagcccggaggaagggaaggagcccagtacgcacctccccggagcgccccgccgccgccgcaccctgctcggccccctcgtggcgccgactctagctgcggccctcggagcagccctgaaaggtttaaagggccgagcggccccgcccctggaggccccaggcctcgccgcgccgcccgccgggacgtggagtccgcgcagccccggcctcggtgcccgcgccctgcccgagactacaactcccgagcccccgcgcccgcgtcacgggggaaacgtgggcggtgtcccaacttcggaggacctgggcgcggagggctgtggcgtgaagaccgctctaaaaccgagatgactagaggttccgtttaaccgattcctgccggggaagcgtcagcaggtggggatctcggggcagcctgcattccagctctacctgggattgtcgccgtgcacatggctggaggagcgtctctccgccactgcgcacattttgcagcctgcaccggccaacggtgagtcctctaggaagctctctcaacgtggcgccccatgcctgcctctggccagggctgcggtgggtccagagaagcagacacaaagacttggctgtttcttaagaaatccaagcgcctgggatttggcttatggttcctgtggctcagcaaactccggaggagggctgctttcattagatactttttgctttcctgcatacaagtacacaatgtactagccagaaatcagtgtccaagacgtgtttcccgactgatcaacacttatttgaaataagacggcagagaccagaggacatccattctaaatagacacatgtaggtgtcag

SEQ ID NO: 951 - DNA, 862 bp, Homo sapiens
tggagcaagcaggaagtgaactgagggccaccctgggaggaagccgactaggcgaattcacttactgaccggcctgggctgctctgagacatggaggaagccagtgaaggtggaggaaatgatcgtgtgcggaacctgcaaagtgaggtggagggagttaagaatattatgacccagaatgtggagcggatcctggcccggggggaaaacttggaacatctccgcaacaagacagaggatctggaagccacatctgagcacttcaagacgacatcgcagaaggtggctcgaaaattctggtggaagaacgtgaagatgattgtccttatctgcgtgattgtttttatcatcatcctcttcattgtgctctttgccactggtgccttctcttaagtaacagggaacctctcccacctgcccttctcttcagggacaaccctccataaatgtgtgccaagagggtctcctttcctgtcttcctctacagagaatgctgctcggtcctcctacccctcttcccgaggccctgctgccatgttgtatgccccagaaggtaccttggtcccccggaaggagagaaaaaagagagatggactgtggctgcatttcttgggtccttagagtgggctggagagacctagagggcccagcatgtggctgggaaactgttggtggccagtgggtaataaagacctttcagtatccctatatgtgtgaggcactttctctcttcccattttgcctttggcttttctatttcttttcttcctgaggataccttctggctaaaattctctcatctgaggtccaagttgttggaagggcaaagagtatatgtttggagaagaaagttggagccccc

SEQ ID NO: 952 - protein, 98 aa, Homo sapiens
MEEASEGGGNDRVRNLQSEVEGVKNIMTQNVERILRENLEHLRNKTEDLEATSEHFKTTSQKVARKFWWKNVKMIVLICVIVFIIILFIVLFATGAFS

SEQ ID NO: 953 - DNA, 1154 bp, Homo sapiens
tggagcaagcaggaagtgaactgagggccaccctgggaggaagccgactaggcgaattcacttactgaccggcctgggctgctctgagacatggaggaagccagtgaaggtggaggaaatgatcgtgtgcggaacctgcaaagtgaggtggagggagttaagaatattatgacccagaatgtggagcggatcctggcccggggggaaaacttggaacatctccgcaacaagacagaggatctggaagccacatctgagcacttcaagacgacatcgcagaaggtggctcgaaaattctggtggaagaacgtgaagatgattgtccttatctgcgtgattgtttttatcatcatcctcttcattgtgctctttgccactggtgccttctcttaagtaacagggaacctctcccacctgcccttctcttcagggacaaccctccataaatgtgtgccaagagggtctcctttcctgtcttcctctacagagaatgctgctcggtcctcctacccctcttcccgaggccctgctgccatgttgtatgccccagaaggcaggaatagagttggagcggtgccagcagcaggcgaacgaggtgacggaaattatgcgtaacaacttcggcaaggtcctggagcgtggtgtgaagctggccgaactgcagcagcgttcagaccaactcctggatatgagctcaaccttcaacaagactacacagaacctggcccagaagaagtgctgggagaacatccgttaccggatctgcgtggggctggtggtggttggtgtcctgctcatcatcctgattgtgctgctggtcgtctttctccctcagagcagtgacagcagtagtgccccacggacccaggatgcaggcattgcctcagggcctgggaactgacccagctggtcctgaaggagaagccaaatggctgcactggccgattctggtctccagaggaccttggtgtttgctctcccttgacccaccccagtgagtgccaaagggcagccccaacatgtgcacccctgcatttcctgtcatgccacagactggcccttgagggcagcctgctgtactggccatgctgggccagccccacctggagctcagtaaaaactgctgtttgattaaaagctggtatctgtgtgtg

SEQ ID NO: 954 - protein, 136 aa, Homo sapiens
MLLGPPTPLPEALLPCCMPQKAGIELERCQQQANEVTEIMRNNFGKVLERGVKLAELQQRSDQLLDMSSTFNKTTQNLAQKKCWENIRYRICVGLVVVGVLLIILIVLLVVFLPQSSDSSSAPRTQDAGIASGPGN

SEQ ID NO: 955 - DNA, 661 bp, Homo sapiens
gcggccgctccgcaggcagagaagccgggagcgggcgaggcggcggcggcagcagcgatggcaggaatagagttggagcggtgccagcagcaggcgaacgaggtgacggaaattatgcgtaacaacttcggcaaggtcctggagcgtggtgtgaagctggccgaactgcagcagcgttcagaccaactcctggatatgagctcaaccttcaacaagactacacagaacctggcccagaagaagtgctgggagaacatccgttaccggatctgcgtggggctggtggtggttggtgtcctgctcatcatcctgattgtgctgctggtcgtctttctccctcagagcagtgacagcagtagtgccccacggacccaggatgcaggcattgcctcagggcctgggaactgacccagctggtcctgaaggagaagccaaatggctgcactggccgattctggtctccagaggaccttggtgtttgctctcccttgacccaccccagtgagtgccaaagggcagccccaacatgtgcacccctgcatttcctgtcatgccacagactggcccttgagggcagcctgctgtactggccatgctgggccagccccacctggagctcagtaaaaactgctgtttgattaaaagctggtatctgtgtgtg

SEQ ID NO: 956 - protein, 116 aa, Homo sapiens
MAGIELERCQQQANEVTEIMRNNFGKVLERGVKLAELQQRSDQLLDMSSTFNKTTQNLAQKKCWENIRYRICVGLVVVGVLLIILIVLLVVFLPQSSDSSSAPRTQDAGIASGPGN

SEQ ID NO: 957 - DNA, 6920 bp, Mus musculus
  misc_feature (1)...(6920): n = A, C, G or T/U
gttctgcccgtcagtctggcccctgcacagtctcttggctctaaagacgactccttgtatctgggtgagggctgggaggagggaagggctgggaggttgggtcaaggcaagagggtccaacaaaaggagaatccggcccggcctctcttccttctgcctgagttggggcagaaaagggcctcagctggctgccactgaggcctctcagctgggcagaaaaggctagagagatggaaaggagttaaaactgtaaagaaggaaaatggagaggaggcaggagggaggggtgaggtaactaaggcaacgttgacaaagcaggaagcccgacccagtccctagggccttgcgttccctcctctgaaatcgctgcacatcctcccaaccagggtgggaatgccctgagaggccaccaccactggcatctcacccccccacccccacccccgctcagtcatgtgggggcagggaagctgactgtctccagttgccatggagacggagctgttaagaagccaataagtagaggagacaggaggagagagggagagatgagggctaggtggggagaaagtgggaatagactagggaggaccttcctccctctccccagtttacaaagcatggggtctctttcagatcgttctgggcccctggatccatccaagccaccactgcccccgcctcagtctaccatggccagaggactccccataaacccttccttccctacccgccctacctctggctaccatttcccggtgagtaaatcttacaaacatctcatttgcacaacccctcccgcccccccaccccccctccccgctcccgttccacccccaacatgcgtttatattctagatgccaggaaacctctgcctgtgcattacaaaccagagtgaaacaaacaaacaaataaacaacaaaatagctcctcccacttgcctaaagggtcctttcatcccttccttagtcacccctctgctctgctccccgctccagcacagctcagcagggctctccatcctctgctggggttgggggcaaggctcagctaccttcacctgggccctggaccacaggacccatctctggccagaggggtcagctgtcgtcatcccaactcccttccccgctgtgatctggtggctattcactttcgtattttacagaataaaaataaataaataagcaggggaaatttcgcagtaaggaaaggaccccaactagaggcagggggaagcattgtcagtctccttttgtagtattttatgtttgtttttgtttgttcagttgtgttttctgggggaggggcagttgagagggggggtctcatggagcccaggctggccttagactcacatctaccctgcctcagcttcaagcatgaacaggctaacaattcagtgttagtgttgaaagcagcacatcagctctacccccttgcaccccagcttccttgttcttcaactgcctgcacttcacacctccctctctcctccctcctccctcttccctcctccctcatttccctctttccataatgcccacagctgaagacagcaatgaacccacagcctgcaaagcagggacctgtttttggaaggcaaggtagagtgtcccctctctttccacggctccacatagggaggggaggcctctcctacacacaggctcctagaattttggggttgccttgaacagggcttgctgcatccctcctagccacacctcctttttgtttgccaagcctccaagtcagtcagtacaggtatcattaccaccaaagccatgatctgctgtgccctagagtttgaaagcagaggccctgacctccaggccctgtcttcagtcagtgtgatcccttggccaggtgaggggcaccctagaatgaagtggtcaaacctaagaccctccatagtgagacagctgagtattatccctcatcaacaggcaaccttgggctgtcactcccattgtctccactctccagagacttgcccctatggtcagtgccttgagatgtatgaccacaggaccttagaatgtcaagatagggggtggggggaatggaccatttgaaccatccccgagtaaaacaggttacaggagggttagcgtattccagcccaaggtcaaacggctcacacgaggcacagtccatcttagtctcagttgctggtgaacctccatcaccttgaggatttttgtttgtttagtttttgtttttgtttgtgttaccataaagttatctggaaccaagcctagcaaatttggtgagaagttaagcctggtgatatgtcaaggctgtaaagagaaaggatgagtgaatgaggtgtgttctcctgggtctccaaagctagctctgaggagcactgtgaccaaggatgcctagacccattctcactgatgttcatgagtgctctgaggagcactgcgactaaaggtgccctagccctcttcctgctggtgctcatgagtgctctaaggagcactgtgactaagggtgcccctttctctctgacgttcatgagtgctagttctcccttttccttacagggcgaggtacatctgctagaatggtgagctgccttcttctctatcctgtaatctagggacttctctggaaaactgatagggctggaatgagcatccgagggaaaggtctgctgtagagtcattctctcttccaaaaatataacccattggtgccacccagagcctccccactctctgagcactcctaaaggagaagtcagttggggcatgcccttcttgtgtacataaggagaaagtgagacggctagagccaccttcctctaggtcagtggcttcttccatgtcttacttcctcactaataaggcacatgtttaaaagggaccacaggtctagtcaaacccatagtcctacaccttaggtaacaaagaaaccagatgaggacatctacctggagtgtgagccggatccaggtgagcgcctgcccctcccactacccatgaacacactctcctggccccgttcttgttccctccaaaatactcccctctagaccctacctgggagtcttcatttctgctgttggtcccacactggccctaccaaagaggtgactggcactcttagagcaaaaaacagggggtagtgggtggggagggggtgttctcagctgctccagccaggccaccaagcagaatctccccatggaaggtctccaggagagccaagtcaaaggcagcagtagtagacccctaggctgttcttagccacttcctgatcagcctggacttccctgcctggtccccagccagactctgtatgccctctctattctagttccagtcttgactaggtctctgagctccaaagccctgatacctccagttcctctgccaagaacatctggattgcccaagtaagatgcagcagtggaagggaacaacatgggacaatgggttcactaataaaggaaaccccagaggccagacacaggagcaaatgtctttctttaatcccagcatttgggcagcagaggcaggcagatctctgtgaattcaaggccagtctgatttacttagagaattttggattaattgaggctgcctagtgagaccctgcctcaaaaagaataaaaaaatagattaaaaaagaaaaacaagggttggagagatggttcagtggttaggagcatggctgttctttcagaggttctgagttcatttttcagcaaccacagtggctcacaaccatctgtaaagggatccaatgccctcttctggtgtgtctggagacagtgacagtgtactcacatatataaaataaatcttaaaaaaagaaaggaaggaaggaaggaaggaaggaaggaaggaaggaaggaaggaaggaagaaagaagacagaacaacaacaaaaaaatcctctgagctctgctccccaatttattctttgtaggtcagtggctggttaccaggaggctcggaatgtaagaggctagtggtcaaggaagaagagagcccagaggggtgggagggaggcctagggtgggacttcaggttttgggcagcggcctggaaggccagttctcatctgaccagacttcctgtgtcccagggagctatggatggtgcgttgaaaggtaagtacacaccgcttcatctccatgggtctgctctgctaggatcttactccctctggcaacagatcctccccccaggtcctcaggttctgtttacttcaccaaaggggtccatgcagctatgacttctgcctgatcaggcctgagaggaccctcttgggcctttcccagggtctgcactaactcgaaaagcagccagtatgtgtcccaagatcagttctcacttggaaatcaggcaaggcctgtctggtaggtcctccctgagtgtcaggcctgggaagacaaggtgcacagaatggccaatgttaggtttcaaacatgctggcaccctctgctgcagtagtcccccatgaagccttcttacccatccccttcctggttccagccttcttctctgcttctttcagcaggaaggaggctgtctgcttcctccatagcccctgctctgagtagctctgttgctgaggtgagctggggcagatgtgggagatgtctgtgggaagcagagtccttgcccaggagccctcctaatcctggggcctttacacccccatgaggaacacgcgtgtgcacttaaccgggtgtgcagctcccccgtccccgtgctgcaccccaggcacagacactacttggtttggcctgtaggactcaggctggggctggcagatggaaacacaaataactgtaccccagggttctctgctcgccatgagcagctcagcacttgggtgtctctttgagtagctctgtgtattgtacagaatggtagtctgctgggtcagccttggtactctggaaactgtgaccgtcagtctgttgagagagccctgcttcacttccaaaaggtgggcatctgtcaactcttggccttctctgaaagtcctctagtctctgcccatgcctgatgaggctggcagtaagggcgggggaggcgcttcacataattagtcagctggccttaggcaactaagatgaagttcatggctggggtctcctccacaggatggggcctacacggtgcgcctcagctctgggcctcacagttcccagcccttcactttggcagtactcctcagaggccgtgtcttcaacattcccatccggcaactggacggtgggcaccactatgccctgggtcgggagggcaggaatcatgaggaggtgggtaccggatgagtcatgggccaatcaccgaggtgggtcaaagagcagcaccctgggccttgcctggagcatgtgtgttttcggggggtgggggacaccgattgcttccctccctcaccctggcttgaacagaaatgcctctgaggtagttctgtctctaagtgcctgccttgcaatatgaaggtctgagttttacccccagagcctcagggggtaaagtaaggcaggagaggtggctcaggtttatttataatcttgggctgggaggttgagaaacaggtatccaagtcagtgagaggccttgtctcagaagacaaggttgggactggagagatggcactcactggtttgaactggggttccccgtacccacatggccggcacacttgtctatagccccagttctgagggtcttagcgccctctctggcctctgtaagcacacatgcatgagatgcacatatatccgtgtaggtaagacactcgtacctatttaaaaaaaaaaattaaaagaaaaatcctaataaacaaggtagctaggcatggtggtactcaccttcaatcctactccttgggagctagaagcagatggatctctttagttctagaccagctggaactacgcagtgagaccgtgtttaaaaacaaaataaagctgtgtgtgtgtgtgtgtgtgtgtgtatgtgtgtgtgtgtgtgtgtgtagccagaggccggaacatcttcccagannnnnnnnnnnnnnnnnnnnagccagaggccggaacatcttcccagacatctggcactgtgaaaagaggcctatcttttctgggaaggacttccgtgtgccatggttcagtcttcatagggtcaaggtgagggcaatgagaccatctgagaggagggcagaaatctccaaggacctttctccccagcaactggcttcagacctagacagttgcccaccactcagcttccattgagagaggccacagccaaggaccaggcctaaagcagttctcgcccagctctggaagcccgaggctggccaatagcatagcatgctggtgcagtggcaggctcacaaccagacagcagagcggcgtttcagtctcatagcgtggggggaagaaaaaatatctagaaaaatgccagccaggtcccctgccaggccctacagttgccttagaaagttgttggcagactgaagcctaagggacccacagatgccctgcctgccttatccagctcttctcctctgtggccgccatggttcagcattacacgaagcaccccctgccccttgtggacggacacagtggcaaccggggactcacctacctgcgcttccccaccaagccctgaagaaacagcagcacacagatccccctcaggcacgtgatgtgtgccccattcactttctctcccactttaggctgttttcttttccctgccttcctccaccccaaaagctctgcaggttcaaactgagaggcatgaagatggccacctgggaggctggcttcctcagagacactgcctctccttagactgacttcttgtgtgtggtttgcatcttctgggaggaactaggttcccagcacacagtatactttcaataaacatttactgactgaattctctctt

SEQ ID NO: 958 - DNA, 1155 bp, Mus musculus
gttctgcccgtcagtctggcccctgcacagtctcttggctctaaagacgactccttgtatctggatcgttctgggcccctggatccatccaagccaccactgcccccgcctcagtctaccatggccagaggactccccataaacccttccttccctacccgccctacctctggctaccatttcccgctgaagacagcaatgaacccacagcctgcaaagcagggacctgtttttggaaggcaagggcgaggtacatctgctagaatggtaacaaagaaaccagatgaggacatctacctggagtgtgagccggatccagttccagtcttgactaggtctctgagctccaaagccctgatacctccagttcctctgccaagaacatctggattgcccaagtcagtggctggttaccaggaggctcggaatggagctatggatggtgcgttgaaagcaggaaggaggctgtctgcttcctccatagcccctgctctgagtagctctgttgctgagaatggtagtctgctgggtcagccttggtactctggaaactgtgaccgtcagtctgttgagagagccctgcttcacttccaaaaggatggggcctacacggtgcgcctcagctctgggcctcacagttcccagcccttcactttggcagtactcctcagaggccgtgtcttcaacattcccatccggcaactggacggtgggcaccactatgccctgggtcgggagggcaggaatcatgaggagctcttctcctctgtggccgccatggttcagcattacacgaagcaccccctgccccttgtggacggacacagtggcaaccggggactcacctacctgcgcttccccaccaagccctgaagaaacagcagcacacagatccccctcaggcacgtgatgtgtgccccattcactttctctcccactttaggctgttttcttttccctgccttcctccaccccaaaagctctgcaggttcaaactgagaggcatgaagatggccacctgggaggctggcttcctcagagacactgcctctccttagactgacttcttgtgtgtggtttgcatcttctgggaggaactaggttcccagcacacagtatactttcaataaacatttactgactgaattctctctt

SEQ ID NO: 959 - protein, 286 aa, Mus musculus
VLPVSLAPAQSLGSKDDSLYLDRSGPLDPSKPPLPPPQSTMRLPINPSFPWTSGYHFPLKTAMNPQPAKQGPVFGRQGRGTSARMVTKKPDEDIYLECEPDPVPVLTRSLSSKALIPPVPLPRTSGLPKSVAGYQEARNGAMDGALKAGRRLSASSIAPALSSSVAENGSLLGQPWYSGNCDRQSVERALLHFQKDGAYTVRLSSGPHSSQPFTLAVLLRGRVFNIPIRQLDGGHHYALGREGRNHEELFSSVAAMVQHYTKHPLPLVDGHSGNRGLTYLRFPTKP

SEQ ID NO: 960 - DNA, 26993 bp, Homo sapiens
aaacttggagacagctattgactcagtccctggactctttaataagagcccgttctgttttgtttgtttgtttgtttgtttgtttcctgagacagagtctcgctctgtctcccaggctggagtgcagtggcgcaatctcggtccactgcaacctctgcctcccgggcttaagcggttctcctgcctcagcctgcctcagcctcagtagctgggattatgggatcacaggcgcacactaccacgcctggctaattttcgtatttttagtagagacggggtttcaccatgttggccaggctggtctcgaactcctgacctcaggtgatcagcccaccttggcctcccaaagtgccgggattacaggcatgagccaccgtgcccggactgagcccattctcttattattagaaatcttattatcagaatgtgagtttctgcattccagggcttcgcaccagaccctcaagtcagtaatgacccttgggacatgcagtgtgccaaaagctgttgaatgcccattcctgctccctgaagatccaaccagcaatcagcagggtgcagttaaagtcacagagcagtgttgttaggtcattacagggaatgtggctaaggaagggcaaagcccagcaaaacttgtcctaacttcccacgttctttcgctctgcgggccttgccttcatttaccttcctgataactaaagcctgggtcggtggtcctccaggccacgccccttccaccgtcagcctccgggcccaggaaatgagcgacaggctgccatgcccctcctcaccaccaggggtcgccctctcccgtggaacgactgcttaggtccccacagtggcccgggacggggtgaggggactgtggctttggctctgtgtacatcatatggccttggccagcatccattcttctctggcctcggcttttctgttggtaaaagggagggagggtgatctcagggccctccaggcccatcaaggaaggaggtggggttggagacgtcggggagccactgtgtccagtctctcctaacggggagggtagaagaccagctgggaacaggagaagcttggctcccaggctctgtgctgaagaaggaagcctaagcagggccatgttacatttggtggaggagggagagtgtaggggaggaacagacgccggccgctcccgctaaggaaggcaaattgaggaaaggacccagtggggtggggaaggtcggccagaggtatccagagaaccagagaaagtgagtgtgagggagtccttggtgatccatctgcgctggggaaaaaggttttcagcagataaacagccgggacctcgggggattgtgcctcagcctaggcccggtagtcgaagacatatggacaggaaatgggcaagacacgggcctttcagagaagagagaccaaagatgtttgcagagaggcaggctttgcgcaacctgtaaagaatgagtaaggtttgaatagcagctacaacaaatattgattgagagcctgctgtgtgccagactgtgggcccggcacttggaatttggccgtgaacctagcagacacagtggctgcccatttacatagcgtgcagtcgagtgtgggagtttacagtctagctgtgaaataaacctgtaggtttaattatggtgggagctcagagagcggggtaggagactgtcctggtctgggacctccactgctgaggaagggtcacctaagctggggcctgcaggaggagggaggaaaggggccaggatgttccagaggaggaatagcaaatgtacactccagataagaagggcctggtggagattagaaagggtggaaagaagccatgtcacactgtgtttgcaaccactctcccccacacccaacctcacctgtgtatcctgtgtacttggtcacctcctgggctctcttgggggcagaatctgggcagcgggggaatggatcaagctgaaagacagctaaagagactgtggctgagtgcaggataaagagccaaggtggaagggagagggctgggctctgggagacggggacatctgtgaagaggatattgccattttgggggtaacattttttgaagtatgatatacatatagaagagtccttttttctttctttcttttttttttctttttactgttgtgctgcatattaagaatgccctcttggtcgagtgcagtggctcacacctgtgatcccaacactttgggaggctgaggcaggaggattgcttgagcccagaagttcaagaccagcctggacaacatagtgagaccccatatctgtttttaaattaaaaaaattaaaaagaatgctctctctctttgtcatattctgtaaagattgagtaaatatctagaaattccactaaaatttccttaagtcaacaggacacagaatggtctgcctgggcctcagtcacattggaggagcagagagagaaggtgagtgtgagggagtccctgggaaacaatggagggactggggatggggaggtaggaggggcctgatctttccaggcatcaagaagcatttggtttctgttcaaggagccatgaggagtcactcaagggttttaggcagagccgtgacacaaccagagatactacgagcaaaggttccggaacagggcagggcaggacaggtgagtgggacagaggcacaccacctgggtgggacagagggaagaggatgctgctgtctgggacactgtgccctagaggctggggaaaaccaacctcaactttcagctcccagcctaaccctaggagaacctgagaagaactagtggaatgccttccggaaaaacagagacaaactacacaccagacttttgtttgtttgttttgttttgttttgagatggtgtttcactcttgtcacccaggctggagtgcaatggcacgatctcggctcactgcaacctgcacctcctaggttcaagcagttctcctgcctcagcctccctagtagctaggattacaggcgcgtgccaccacgtctggctaatttttgtatttttagtagagacagggtttcgccatgttggccaggctggtctcgaactcctgacctcaggtaatccgcctgccttggcctcccaaagtgatgggactacaggcgtgagcccctgcacccggcctgttttttttgttgttgttgttgttgtttttgttttgttttgttttgttttttgagacgaagtctcactctgctcactctgtcgcccaggctggagtgcaatggcacaatttcggctcactgcaactcccacctcccaggttcaagtgattctcctgtctcagcctcccgtgtaagtgggattataggcgtgtgctatcacacccggttaattttttgtatttttagtagagatggggttttaccatgttggccaggctggtctcaaactcctgacctcaacagatccacctgccttgacctcccaaagtgctggggttagaggtgtgagccactgcacctggccaacaaactacacaccagactttctacccactgccaggggagacagagggatggtctctcacaaagctctgaaactgtggcaagaaatgattgtgcaccagggagggatggggcagaggcctctcctagggagccatctgtccctcgctctgtcagcccttcatcacccatcacagctgtcccgagtcagctgagtcagcagacctgtgacagcagcaggcgagggaggaagaggggcctctgctagcttgtgtgaagccagccccatcatccattggcccaggacagccccttccctccctactgcaaactgctgtcccccgggattgcccctggctttaacttgaacccaaccacagagttccgttggctgtaggcccttccaccaggaacgtcttgggcctctaacctgagcacctgctctggcaaaaatgtcctgaggactcaaggccccttacccttgtgggaccttcttctccacatgcagctccctgccctgtccccctgtttccaggctggtcttgagcttctgagctccccagctcctgtccccctatttcctcagggacagacctctccccacgcacttggccctaacctcatgttcagaaagttctttcctttctaccccacctaaacttcacttgcctttgtgggttcccactctgctgggagaggaatccttgtgtcatcagtacctctcttccactcccctcaagaagggaaacctggctttcccatggtggcccccacataacctcctgttggcctggcctcccgctccctggccctgccttcccctagtgcctctgtcttcctgtgcttccttatatttgaagtccaggtcacatctccctccctctttcccttcctcccttctttttctttctttctatctatattgatggatttttttaaattataaaaataattaatggttgggcacagtaggtctcacctgtaatcccaacactttgggaggctaaggcaggaggatcacttgaggccaggagtttcagaccatcctgggccacatagcaagacctcatgtctacaaaaaatgtttaaaaattagctgggcctggtggtgtgagcatatagtcctagctacttgggaagttgaggctggaggatcagttgagtcctaacctaaacttgaggcatgagtttgaggctgcagtggtctatggtcatgccactgcactctagcctgggtgacagggtgagaccctgtctctaaaaataaatagtcctggctgggcttgttggcttacgcctgtaatcccagcactttgggaggccgaggcaggtggatcacaaggtcaggagtttgagatcagcccggccaacatagtgaaaccccgtctgtactaaaaatacaaaaattagccaggcatggtgatgcgcgcctgtggtcccagctactcaggaggctgaaaaaggagaatcgcttgaacctgggaggcagaggttgcagtgagccaagatcgtgccactgcactccagcctgggtgacagagcgagactccatctcgaaataaataaataaataaataaatagtcccaacactatacaagtataacgccgtaacactagttctatctggttccaccttcccaggagacacccatacctgggttcactgtttgagtttcttggcatccatttggtgatcccactgactctgaggtttcatccccaaattaaagttcttttctttctttcttttttttttttttttttttttgagactgtgtttcactcttactgcccaggtttgagagcaatggcgcgatttcggctcacagcaacctccgcctcctgggttcaagctattctcctgcctcaacaacctcctgagggctgggattacaggtactcgccacaatgcccggctaatagttttgtattgtttttagtagagacagggtttcaccatgttggccaggctggtctcaaactcctgactttgtgatccacccaccgcagcctcccaaagtgttgggattacaagcgtgagccaccacgcccggccggattaaagttcttaactgaaagtaagagaaacagactctagctagtttaagctggaaaataaattattaaaactattctgtagctcatagcatctccagcagggctagagagttagccaggaataatgtcccaaaggtcacagccaagccagcctggcagagccaccctggacactgataccactgtttgccaatgccattgatttgggccctgggtggtggcactaagggctcactcccctaagcctctggaaacaggatttggctgtcaccaccctcccagggtgcatttttcttggtgcctgatgcaggttcagagtctggcacggggcctctggctggcagaccctgcacctcagcggcaaggggaggctgggaaggcctcacctggcttctgcaattggaaacgaggattcatgaggcggagaactccccaaatgtaaagcatgtttagcagccaaaaaggatggcagatgtccccttctgttcttggtgagcccagccacccacatctccgcggctcttcctccacgtgctgcgctctcccacctctgagacctctgaccacagcctgcttacctgtccccctgcaggtcctcagagccacctccatcttcctccttgcaatgaatcccactccactcacaccacgggtcccggctacacttcgccatcttctctgtctgctggcaaaaatgacctcaagtatttcttccatatgtaggttttcgtccacggttccaggctcataactcccacagccctgtttagagcctttgattatgatgttggctgtgttaggcctcaggagcaggccttggggaaacagaatctctctggccttttcctgtcctcctttcacccgcctaaggccgtactctaatcttcctccacctttctgattgtgggaccctaattccagagagggtcctgccccatactctgggagaaggaatgctgtggttatgaatcttctataaaaacccaagaggcctggttcagagagcttctccatagctgaccatgtgaggctcctagagtgtggtgtgcccacggagggcatggagcctccacaccctttcccactatttctgccctacacatctcttcatctgtatcctttgcaatatccttcataataaaccagtaaacataagtaagtgtttcactgagttctgtgagctgctgctccagcaaattaatcaaacccaaagaggaggttgtgggaaccccagcttgaagccagttggtcagaagttctggaggcccagacttgtgcctggtatctggggtggccgggcaggcgtcttggggactgagccctcaacccgtgggatctgactctgtctccaggtaggtagtgttggaattgggttggaggacaccccgctgtgtccgctgcagaactgattgctcactgggtggtggggagaactgcccaccccgccaccacgtttggtcacagaagtctgctctgtgttgactgttattgtgtgagagcaggggaaaaatccatttgagttttatctaaacaccactgtgtgttttctgagggtggattaagactaccttgggcccatggcctgttctcagtagctgagacctgagaaatttggagaatcactttgtgctatggaaggaccataaaacaggcactcaggtgctgctggacagtggggcgttataccttcaaaatgtgagtttctagtaagtccacttccaggaattcatccccagggaatatctatggtgtgcacagagcaattccatgccaaagatggataaagagaatgtcccaatctgcctgtgtgacaacatgaggccactgaggcaggcctctttccttccccttctcccagatctgcccaggccagtgcccccacccagatggcatggactctgccctctgcctggggccctttcactcacccaggccttggcatttgcctatgcaaagccctgagcagagcagggaggtggctggagtgagggcagcatggactgggaaactcgctcaggctgaggtttacagtggggtggtgtccagaacttcctactgaccctgattccaaacgaggtccccttgggtgagggaagttgccgcctgccttatggttcaaatgtggaagaaaggtcagctgagagtggaggacaaagaatagacccagtagaaccaattctggatgaggatttgttatttttgtttttttggtttttccctttgtaccaaatgggctccctgtgaagccaccccagtgactcttcttggtttcttggatgcccttttgcctgcaggtcccaggaattttctggtcttcctctccatccctgggtgtctccccagtgcccccagcctggtggcccccaaagatgcaagcacgtgggctttatttctcctttgtgccaacagccaggatgccaccgaaataataagcacaagaaagctccagggccttagaagttctcatgtcatcattcatgatcgtggtctgtgtttcctcattccctgacttaaacagagtcagacaccaggccccagccctcctttttatctttttatcgccacgcttctcagaaagtcaaagttcctaaattcactcaggtaacagagcccctggaagtcatgagctccttaaggaaggtcacaattagcactgctaattccatcgtaggaaagtagggtccagacccaatcctggtgaggtacaggatgcttagcctttagggcacaggctctggggcaggcagagctcaggttgaatcccacctccaacacttgctaagtgcatgacctcaggaaagctattcaacttctcagagcctcagtgttatgactgaattgtgttcccttaagattcatatgctaaaatcctaaccccccatgtgactatttagagatagggtctttagggaggtcattaagaataaatgaggtcatgggggtggggccctaatctgatagtgtgggtgtcttcataagaagaagagttaccagaaccgcctctctctgcacagacaagaggccatgtgaggacacagagaaagcagccgtttacaagccaagaagagaggccgcatcacaaaccaacctttatggcaccttgatcttagacttctagctccagaacagtgagaaaatgacatttctgttgcttaagccacacagttcgtgggttttggttatggcagcctgagctgactaatacactcagtttcctcatttgaaaagcagggataaaactagtacttgcggcatgacgttattgtgagaatccaatgaggaaacacacgtaatgcctgcctgcttcgttttcctacggcatcttcaacgcctggaacagcctctggcagacagtggatgttcaataaatacccactgaatggataaatacatccatcaaaaaatgaagctgccacactaaatatgagaacttctttctaagcgcttccctcgccttcatctccttaatcgttggtcatcactcaccagcaaatgacaacagtagtaaagggtttaagaaaagtgtctgcaaggccagcatgctgtttttaattggatctgccaaataatgtaatgttgtctatgagttgagaaaggtgacactgatcagagagctgaaggaagcctgagaaccctggtccagcttggctcttcctcttatcgtgcagaggggctggagaccacagctgggggaggcccgcctaggggaggctcagagacctggggctgggccctgagagtgtcctggatgaagttggtccagggttggaggccacagcagatctaccttcctggtgtttaggagatgcaaatgatgggaacaatggagcccttgtccccaggccatttgtggcagatcctgggctccagggaggcaaagctcctctgcctctgccatggtaagatgtggtcccgggacggcctcaggcatgtaaacctgcccacctgggaggcccaggactcggccacgggggtggttgcactgacccctgtactccccaccctggctttttccaggacaagctcagtgggagcaggccccggtgagtactgggactcctctctcccctgccctcccctcttgtctctctctacccctcctctcctgggcacagccatcccaggagctgtgctgtctctgcctggcccctctctgcccagggagaccattcacgcgcctccacttcctgtcagcactagggctccctgactcccggcttccccagggcaccagctcatgcagttatgcacccacgggcaccagctctgcccccagcctccttctctgctgccctggtaccagggtacctgtcagtcacactgtcatggatgtgaatgtcccagaacacagcgtctgtctcatagaaactccagggccccttgggcagagttgactagaatgtgcttgcaggctggggccaccgctcccaccccccagatgtgtgggtaagtgacacagggggtcagaggggcccaacagactgggatcccttgcaagtcaggtcccccctgagtgactctgcacacctcctgcctcccagagcccagcactgctgagtcacaggggcctagctctcccatctgtcttggccagagtcaagggtgcaggggacaggggatgggcataggtggaagggccccttgtttccagactgcctacctcagtggccccgtggcagcattgggaatgcctgtgatgagtggttcctttgagttgaagcactggagggcgggtggtttattatactggggaaaggtgggcagggaggaggtgaggccagcttgtctgtccagactccccaggttggagagaagatgctcccagcccttccttcctgcctgccccagggacttggagacacaaggtgagtctgcctactgaggttggggtggggaggcagcggccagagcctgctttgaacaccctctcccctccattcctgctgtgctgagcatcccttcctccaggcccaggaggaggacgaggaggaaaataagtatgagctgcccccctgtgaggctctgcccctcagtctagcccctgcccaccttcctggcactgaggaggactccttgtacctgggtgagggctaggaggtgggaggcagggagaccaggtgcttgggcagggcaggagggtccccacaagacaagaggacataggcctcgcctctcctcccctgcccgcactaaggcagcaaaggaggcctcagctggcagtcaccagggcctcttggctgggcagggagagagagagggatgaaggaacggagggagggagggtgggagggaggaagaagagtgggaagggaagaggaggggtggtgtaaccaaggcaacagcaggggcctggcattccccttctgagatcccaacacttcttcaggccaagggcgggggtgctgggagagccccggctgccgctggcatcccacccccactgctcagctcctcggccaggttggggcagggaaactgcccgcctccagttgccatggagactgggctgtcaggaagccaatgagcaaggggagcgaggaaaggaggaggaaatggaggctggtcggggggaggcgggaggaaaatgggaacccacctgggaggaacccaccaactcacaacaaatgcgatcttttccagatcactctggccccctgggtccatcaaagccatcgccacccctgcctcagcccaccatggtgagaggcctctccagaagtccctccttccccacccgccccatcccaggctgccatttcccagtgagtgaatcttagaggcatctcatttgcaagattcccccacatttgcattcaagaggcccctgaaaaatcagatgccagatgcatgagaagccagagccctgccgctgtcagtcactcctccaactcgcctggcctggtccttccagcctccccttcagcttcacccacggtgcccttctcatgtctctgagggggaggggaggggctcagctgcccttcccttggattctggggcctgaggacccctccccacctccagagcaaagaaatcccttcctcagctgtcagtcactgccagctcccattcccacctttatcccagtgggactttatggattttgaaagctactacctttatcatacatttcactaaaatttttgtaaaaagcagggagcgattcacagcaaagaaagagccacagggtagaagcaaagggaagagtcatcccttttgtacattttttaaagctacacagatacaagtggtcccatcccatcctatcccgccccatccttgcctcctgctctcaccatctgcgctcaccagccccactgtgcccacagctgaagggagcagtgagcctgccggtggccggaaagcagggacctatctttgggaggcgaggtaatggggatgtcctctctttctgtggctccaccctgggacggggagtactcccgccacggggtagagctgtgcttgcctgacatgggtctcatactctgccccttcatggcactcccctggctgtgcccctttttaacctaccaatcctctaaggtaggcaggcaggtggcgttgcctctaatgaaatgaatgaggagactgaggcccagagatatgaaatattgtgcctaagatcacacagaagcagagtctgctcttttttttttttttggctcggctgctctgattttttttttttttattgagtcggagtctcgctctgttacccatgctggagtgcagtggcacgatcttggctcactgcaacctctgcctcccgggttcaagcgatttctggctaatttttgtatttttatttatttattttttttgttttgttttgttttgttttgtttttgagacggagtctcgctgtcgcccaggctggagtgcagtggcgcaatctcggctcactgcaggctctgccccctggggttcacgccattctcctgcctcagcctcccgagtagctgggactacaggcgcccgctaccacgcccggctaattttttgtatttttagtagagacggggtttcaccgtgttagccaggatggtctcgatctcctgacctcgtgatccgcctgcctcggcctcccaaagtgctgggattacaggcgtgagccaccgcgcccggccgaatttttgtatttttagtagagacaagatttcaccatgttggccaggctggcctcgaactcctcacctcaagtgatctgcccgcctcagcctcccaaagtgctgggaattacaggcatgagccactgtgcccagctgctatgattttttgaacagtccaaagtcatttggagccaggcctgccaagtcagttgggaggtcaggaaaggtgacaccatagggctgtgcagagaaccatcaggggatgagaaaagctttctcctggggcttcaaagctggctctgagatgtcctcctcggaggcgccctaaggagactctgctttttcagcctcagtcccgctgaattcctttctgctccctgccgtgcatgacaggtggttctctccttttcctttcagagcagggtgcatcgtccagagtggtgagcagcccctccatttccacctcagtttccaggcttctggttaagaaactggcaggggtggggtggggcctagggagggccaggaaatatccctgaaaccaagggaaaaggcccagagcagggcccctgcccctcagccacaggcccctggcaggcaatgagccagctgtcctgagggtgccgcccagggatcctcctcacactctctgagagctggggcccatgggcgcctctgaaggggaaggtgctcgtgggatgccccctctgagacagaggagaaattgtaatcattcaagctagctcccagaaagagggtcaccatgtgaggagggagtgaggtgcctgccaccccttcaaatcgatggctcctcccccaaaaccccagtcctaaatggagcctcaggactggtcaaacccatggtctcacacacccctccctaccttaggtgccaggccctccaaagaaacctgatgaggacctctacttggaatgtgagccggatccaggtgagcccctccctcagctccagacccctcctgcccgaggccctcagctgctcacagcacaacacactctcctggctccatctgcttcccttgctgcctctcaccaccccccaccaacacgcatttgccttcagtcaccgcatggacatcacactcctgcctgtggtccaggctgacccacactgtgccagcaagggaggtgctccccttagagcatgggctgggtggggctccccagctgctgcggccaggacagcatctgcctctggttggaagcactcccagaaagtccaggctgcagagaagcagcaggccctgcagctgttctcagccctgccctggtcagcatggattccctgcctggtgctcagccgagcccagcctgcccctccctgtttcagtcctggctttgactcagactctcagcttccaagtcctgatgccctcaggccctctgcccaggacatcagtggtgcccaggtaagtgccccaccaggtgtgcacctgtgtgtatgtatgtgagacacagagagagacagcaccccagttcaggcttccccagccctgaccctgggatggaatctccttgcactgtcccatggttgttggcagtggtggcaggggcagcttggaatgctgggttcactggccctttctcttgaaaaacataaagaccctgagttctgtcccccgatttgcttcccacaggcctaccacagccccccaggaaactcggaatgtaagaggctgatggtcaggggagaagagagggaggcagggagggaggctcagggtgggacctggggcccggcctcttctgatcagacctcctgtatgccagggaacagcagatgctgcctctaaaggtgagtaaaggctggtccaaaggtagtgagttatcccaactgattgttcacagtcagttacagatcaaactccttgttctaccctttccccacttctcactactgcacttgactagacttaaaaaaaaaaaaaaaaaactaggtgaatgcaggcatcttcagcatgaatgcaggtggtcctgccagggcctgccccagccccagccctgcaggccagactccctcaggccccaagttactgaggatgtccctgaagctctgactccagctgagatcaggcctgaggggaccctcttgggcattttccggtgcctgcaccaaatcaggaagctcctagtctgtgccccaagatcacgcctcatttggaggtcacacgaggcctggctggtgggtcctgccagggcactggatctggagagtggaggaagcactgggtgccggggtttgggctcggggccatgtacgcctcctcctaccccccacccccgcagctgtcccctagaagccacctttgcccacccccaccccaccccaccccaccccagctcaataatctgcttcttctagaaggaaggaaatcgtctcttccctctgtagcccccactgggagtgcctcagctgctgaggtgaggaggggctgggagcaggctgtagggagaggttccgggagcagagcctgagagtccttacccaggaaccctcttgggctgaagggtgcaccactgcaagaacacattgaacacacgtgtgcggcaccccgccgtgccccagacagggacaccactttgttctgcctgagggggactcagttgagcataggagatgggaacataaataactgcaccctgggtcctcggctccgcatgcctgattgagtgccctggcatgtttctgagtgactgtgtgtatgcacaggacagtgatctgctgactcagccttggtactcggggaactgtgaccgctatgctgttgagagtgccctgctccacttacaaaaggtgggcagccacggaccccgggtcttctccaaaaccccttttgctcacaggctgtggctggccgagcagtggggagcaggagggccaggagggttctggccccatcatgggtcagggcagtgggagggccattggaagatgaggttgatggctggggtctcctccacaggatggggcctataccgtgcgccccagctcagggcctcatggctcccagcccttcaccctggcagtgcttctccgaggccgggtcttcaacattcccatccggcggctggatggcggacgccactatgccctgggccgggagggcaggaaccgtgaggaggtgggagctggaggaggcaggggcctaaggagggaccacagagcagtaccccaggcctagccaagagcatttgcctagggaaaaatcttcattttgtatctttctggggtgggcagaaatgacagagcccagagccctgaactccttccagacacctggccctctggtgggggaggtgcccctcctgccatggctcagtctgcacagggtcgaggtggggcctttgtgcctttaatgaacccagctgggaggagggcggggtccaggatcttcagactcttgtctacctcccccaggactcaatgtcgcacccagcatttgctaggatgcaaactagagacacccatcacacagctccccacgctggaggaccagggcagaggcgcaccctagagtcagtttgatctagccttggacataagagtctggccagtggcgtgcccatgggtgcagcagcaggaaagttgcctgaggcctggaacggggcagcaaaatggcagtggagcggcatggggcaaacaggaaggaagatatctagaaaaatgtcaaaagtccccttgccagagtcccacagttgcctcaggaaattgctcccagcatgaggctcatgggactcacggatgccctgcctccctggccagctcttctcctccgtggcggccatggtccagcacttcatgtggcaccctctgccccttgtggacagacacagcggcagccgggaactcacctgcctgctcttccccaccaagccttgaggccacagcgaagtacacaccgcctttggccccagtttgcttcttgtcccgccccaccttgggctgtcttcctctctccttccccacccctcctcaccctagcctttcccagtgcccacaagcagcattaatggggaaagcctgcctggaggcccagggaagggtcctggagaccccaccccatgctcacctagagccttccactgccctctctgttgcctctccaaggctgacaccctcttcctggcctccaggaatgcaggtgtctgcccagttcactaggtcctggatgaaggaaccgtggtggcctagaccagtcaggggacagcacaggcactgctggaacagcaaaggatcctctcacatctacttgtgggcctagggcaccctgagagggactggcctaccttgcacaagttcacattcaataaacatttgttgaatgaattattgaatctgctaaatgaagcagaggtgtcctgcacgagggaggccccacggttctcaagtgtcacagggcagactagcctgcagttatggagatgcaggagctaggcccgggcagaaagggccagccgtttctaccccagattggggcttttacttttagatgctctgtgccgagcgaggccaggctgagtggctgatttttgttttgatttgtgggagttggagtggggaagggagggaggcgcagtgctgtctctgacaccctattaaatgaggagaatggagtccattacctactcctccaacacctacttactgtaccttgctcccgggggagtgatgagcctgattttgggagcttggtgttgtctagaggaggggagacagtgggccccgggaaacaactagatctgatgctccagtctagagtcaaagctagggaaagctgaacagtggcgctcagagaagacaggacagcgggcgagagcttggggggcgatgggaggtggagaggcactccaggtccccagggggccaggcggagctgcgggacagggcgcagaccccgaggcccagggagcaccgggtggccggcggcctgcaggctggcgagggcgtcgggcggcgcagggcaggccagggggcgggggcgtctggggccctggcgtggcgcccggaacaccccgtgccggaagctccatgtgaccgtgactccgcagaagccgcgagcgcagcgaaacaaagggcggctctgcggccgcctcgagctcaggctggcaccgagggcccggacccccatcccactccgcacccccgggcctcccggcccttcttgccctccgaccccgggctctggcagggccgggaggcgcaggaaccccgcgggggatggggccggcggactggcactgaagacactgggatgcaagcgggaggctgggggcggggggctgggggcggggggcggggctgcagggcgtggacggtctccgtcagtgccggctcctgcggattaccgcctcggaaccgtcatttcttgcctgtaataaggggaagataatcgtccctacgtaatcgtcctccggttaggaggcttaagtgagacatgccacgtaaagggatgcctgcgtaaaggggtgcctgatggggagaaggaaacaccaaattcgggccaattagctgccactgtcaaaatcgctgggaagacacagttatcggccagggcaccaggaaggggcacgggctggggcagccgtcataggggtggggtgcggggggcgggtggacaccggtgtgtgtatgtgaggaagggaccagcagcggaggcctctagcagaaacaggagaataggagaccggcaagacacgccttcagccccactggcccagccctggctccctccagaacctggcctccgtcctccacaccctccccagcatcatcccgcaggcccgcaggggctgtggaggctggggagcttggcaccttgggctgggactcagggtacagtcagccccctagtatccccacaacagctctacaggttccacttccctagaggagctctccactctgtggccacaaaggcctcgggactcaggggcctgttgttactgagccccgcagccatgaggcatttggtgggggagtagaagttacagcccagagctcctgaagttaatggcccaacagggactctgatttttcccagcttagggactaacttcaaggaattagcctccattcctcccctccctggggagaaagagaggaggagcagctaggcagtgggacagtctgtaacccgggcccttgagggcaaaaaggaacctgttgcctgcccagtacctcctcagcttgcaggcctgagcagatggccccttgtccagggagccttcaccactcccccagcctgggcccaggtacttaggccgtcgtctcttcactcccaggacagaccggctactactgcccactattggatattctgggcctggaatacagcaggtggcgtgtatttattgaaagagtgatcaaataggtcaagtctattctggattcctctaaagctgataacattcttttatcagggcctcctttgttaagtgaaaagtccaatccagtgctgtccaatagaactttctgtgatgatagaaacgttctgtatctgcatggtcgagtacagtagccaccagccactgggggtcattgagcacttggaatgtgactaatgtaactgagaaactgaattgttcattcacgatttaattacttttaaatagccacatatggccagggttccaagtctcatgccttcgcaagtgtgaggggcagtggggaaagctggagaggtcggcaggggctaggtctggaggagcctgggaggcctccataaggcactggggagccatggaggctctgagcaggggtggatgcaggagggatgatggtatcctaggagcatcactctcgttgtgtagtgctgaatgggccagaggggctgcacagaggccaggggaacatttaggggctacaggtattctgatcattcaggcgagagatgagtccccttgatttttcaccatgccaacatccctctaagcaccccatccccatttcctcccaaccagccggccagactctagaaaattctaggcagggtcaccgactaggggattaagtctttgagaactgccgtttggaggccgggtgaggtggctcacacctatgatcccagcctgctgtggcgggcagatcacttgaggtcaggagttcgagaccagcctggccaacgtggtgaaacctgtctctactaaaaatacaaaaattacccaggcctggtggcacatgcctgtaatcccagctacttgagagactgaggcaggagaattgcttgaaccctggaggtggaggttgcagtgagctgacatcacgccactgcactccagcctgagagacagagcaagactccgtctcaaaaagaaaaaaaaaaaaaagtgccttttggtgaagaagcccgtgtattacaaacagacagtgggttacctgtctccagaggccggggagggtctgtagcacagggaagctgaaggagtgtgcagctgagaagggcatgaaagcctcagcaaaaccatacctgccggggctcagagcatggtctaagcaaccttctgccaggctttcagctttggtttctgaagaggcagtctgatctttggtgaaaacacgggcagaaggacccaagtttcattctggctcaaccactcacttcctgcgtaaccttagcctcagtctctccacttttatgtttttgaaaccgagtattactctgtcacccaggctggagtgcagtggcataatcttggctcactgcaacctccacctcccgggttcaagcaatactcctgcctcagcctcctgagtaggtgggattacaggtgcctgccaccacgcccagctaatttttgtattttttttagtagagacgggtttcaccatgttggccaggctggtcttgaactcctgacctcaagtgatccacccgtcttggcctcccaaagtgctgggattacaggcgtgagccaccgtgcccggccagtctctccacttttaaaatggggctaataatacatatgtctcaggattgttgtgaggatgagaaatgatgtaaataacatgtataggctgggcgcagtggctcacacctgtaatcccagcacttcaggggaccagggtggaaggatcacttgagctcaggagttcgagaataacctggccaataaaaaaatcccatcactacaaaaaaataaaaaaattagctgggtgtggtggtgtgtgcttatagtctgagctacttgagtcttcaaggttgaggctgcagtgagccatgatcacgtcactgcaccctagactgagcaacagagcaagatcttgtctcaaaaaacaaaacatggatttaacatatactttgcagccatagaaaaagaatgagatcatgccctttgcagagacatggatggagctgggggccgttatccttagcaaactaacacgggaacagaaaaccaaataccgcatgttcttacctgtaggtgcccgtgctaagtgatgagaacacatagatatgtagagagaaacaacacgcactggggcctatcgaagaggggagggtgggaggagggagaagatcaggaaaaatagctaatgggtacaaggcttaatacccgggtgatgaaataatctgtaccacaaacccctttgacacaagtttacctacgtaacaaacctgcatatgtacccctgaacttaaaagtttaaaaggtccatatactggctgagtgtggtggctcacaccggtaatcccagcactttgggaggccgaggcgggcagatcacgaggtcaggagatccagaccattctggccaacatggtgaaaccccatctccactaaaaattaaaaaaaataaaaataaaaataaaattagctgggcgttgtggcgtgcacctgtagtcccagctactcgggaggctgaggcaggagaatcacttgaacccggaaggcagaggctgcagtgagccaagatcacgccactgcactccagcctgggtgacagagtgagactctgtctcaaaaaacaaaaacaaaacaaaacaaaaacctgtatacttagcctaatacagagcttgacatgcaataagagccatctgattggtacctaataatattaataactgtgatttggcaaagcttggttcaggtcacttttttgctgcatttttaaggactcagtctttcccaatatacacacatacttatgacgtctttaggcactataggtactgtaataattattgttgttgttttttaaaaaaaatttttttcagggggctttctggtaaaaactggaaaggctgctagacgaatactaaaagagctgtaacattaataattattgttttgtctgctcaccgggctttcctgttccccttctggtagcacaatccacttcccccactatagatcaggcatgtgacctaggtctgactgggaccaaacagggcccatgaaaacctcttgatgttgagagagagaagccagccctctttccaaatctgagctgcaaatggccaccttccctgcgatgtggatagagcagaagtgaagcaaagacaaagaaaaagagtcttggagactttgggtcctgccccaaagccgcagcatttgccttagtgccccttccagttatgtgagctagaaatttcctttttggtttaagctagtgggaatatggcttctgatctttgtaaagaagactccaggccgggtgcagtggctcacacctgtaatcctagtgctttgggaggccaaggaggaaggattgcttgagctcaggagtttgagaccatcttgggcaacatagtgagacccctgtctctacaaaaaaataaaaagaaaaatattagcagaggtagtgatgtgtgcctgtagtcctaattacttgggaggctgagacaagaggattgcttgagcctgggagttctgggctgtagtgtgctatgctgttctggagtctgaacttagtggcatcaatatggtgacctcccaagagtgggtgatcaccagattgcctaagcaggggtgaacctgcccaggtaggaaacagagcaggttaaaactcttgtgctgatcaatagtgggatcatacctgtgaatagccattggcgctacagcctgggcaacatagtaagaccccatcttttaaaaagagaagaagaggaagactcctgccagtacaggcacacatgtccttgaagtccagggaggtcaggagattcgtctgaagcacagagcagttaatggtagaacgattaatagaacttagacttgtctggtcatctctgaatttaccataaactataccatacattccattgttcactcacaaataataattgagtgcttactatgtgccaggcaccaaaccagcatctcatttttcctctacatctgctgaaagattctccctccccagcttcactaccagtctctaggaacccttgagtcaggggaagactcagccaggtagagaaatagcctttctctaccaggatagggcccagcacactcactgtcttcccagaatcaatactcccagaactcttaagtgctaacgatgcaagaggagccagcgagctacccacccacctacctcgtacttacctgcctacctacattccgtggttctgcccagcatggagtaagtcctagccctggcccagggaccccagctgggcctctgcctgcacacctctctgagcaactgtgctcctgttgccctcatgtctgcagtgaacattttgggggatactgaagttgttttcaaagtgtttttgggctgggcacagtggctcgtgcctgtaatcccagcactttgagaggctgaggtgggcagatcactcaagctcaggagttcaggatctgcctgggcaacatagtgagaccctgtctctgtaaataaataaaagtacttttgatctaaattctcctgagtgttccctttctttactttgcaaagctggttgaagagaaagagaggtggcagcagcagaaggacgtcaggacagtagtttccaaatctggtcctcagaacacccatgaaccatgatgatgatcaccatgtcatcactggtgacaaaaaaaaaaaaaaagagagagagaaaaacacaacctgtggcatgagctttttttttttttttttttttttggaaacagagtcttactgtgtcacctaggctggagtgcagtggtgcgatctcagctcactgcaaccagcatgagctttttctgtgcaaaactattccatttaagggccatcttttaaatggaagtcaagttcttcctcctttcttgatgttaaactatattttcttggctgggcgaggtggtggtggttggtattctcaacactttggaaggccgaggtgggtgggtcacctgaggtcaggagtttgagaccagcctggccaacatgatgaaaccccatctctactaaaaatacaaaaaattagctgggcatggtggtgggcacctgtaatcctagctacttgggaggctgaggcatgagaatcgcttgaacctgggaggcagaggttgcagtgagctgagatcatgccactgcactccagcctgggcaacaagagtgaaactccatctcaaaaatatatatatatatatatacacacacacacacacacacacatatatacgcatatatatgtgtgtatatatattctttcaagtcacttgattttgctgggcctcagtttactcatctttaaaatggggtgagacgggcagggtggttggcctcaaggatccctaagggcctttccaactccagtattcctactgcctgggactatgcctctctcacagcctgggctgcctcccaactcccaccctactcaccccagcaccctctccccgatgccccccaccagcccttctacttagctccaccaggtgtgccctcctaagtgtcctctggggagaagtgcccctccaccatgcactctggattcccaggagatacagtggataaaagtcaaacatgggtttcagacattctaatgtggatttgcccagcttccatgcagccgggaagttggagggacagaaggtgggagatgaggagcaaaagcacaacaggcaccagggtaggggctgggtggggaaagagcattgaaagagagggaggttctggctgagtcataatagcatagattcctaggacatctgagctgctgggctctgagactgccttgtcctgtctcctcacattatagatgaggaaattaaggcccacggaggggagagcagtctgtgaatggaggggagagggtaactccatttttcctctagcagctcctcagctaagggaaagtcctgcctgtgggaaggaatcaaggaagagagattgggaaaccgaggccagagcactaagttaggactgaccaggacaagggccccaggctcccgtgagcccgtgttcctgctcccccgcctgctttctgctccagtcccttctccggtctcccttcctttgcctgtagacctcagctctgctctcaggacatcccagatagcagccctcatgctcagaacacacttttcttcccagggtacatccacttttgcaccccaagaggatccggagataaagaaggtaccaggcaattccaaacactggggctgggtcccagggagaacaactgagccaggtgtctcacctgcgaacctcctgtcaccttcagccctgagatgcaatggcaataatccatggccactttggaagcctctctcatacactgtcagcttgcatctgcggcacctgcagctgttgctgggggctcatttttatatttaattttttagagacgaggtttctcttgcccagaccagagtgcagtactgcaatcatgactcactacagccttgaactcctggctcaagcaatcctcctgcctcagcttcttgagtagctgagactatagggcacaccaccatgtctggttgttttttaaatattttgtagagacagaatctcactatgttgttcaggtgggtctcgaacttcttggcctcaagcaatcctcttgccttggcctcccaaagtgttgggattacaggcatgaggcactgcacccagctggaggattgtttttaaagcagtgatgtcatggccagagagaaaccagccccacagttcccagatcagcctgggagatgtccacaaacttaggaaggcttccagcaaagaggccttgggcaggctgggtgatctcccaggccctaggctgtgcctgcccttgattgcacagaatgttcactgcctgggaagctgggagctgggacagctgggtgacctggaaatggaggggctgaggagctccaggctggcctgctcctccttgccaccctcttcctgataacaacagacaaggctgggaggctcctgggagcctgctgcctaattcccagggcctggcagccagccctgcagctgatgcaaggccaggggtgggtgagctcagcctgtccccagcacccagagcctcttgcacctggtatgcccttgaaaatgcatctgttcatgccccctctgcctcagcctcctagggtccagctctattccttctgaaagcgtaggagggccacctaaggatctggaagcaggccttgcttgggggatggggtgggaattaggcagcaggttcccagaagcctcctggccttgcctgttgctatcagggagagggtggcaaggaggaacggggcagcctggagctcctcagaccctccatttccaggtcatttctgagcatctctgagtcaaccccgcacctctgcatgggcagcctaagagcagtgcggggaccacagccccgcctccagggacctctgcagtggaatagaggggcagggctccctgcgggctctgcccctcagggtctgtccacaccagcccacttcctcttccgggagaggtcagacagcccctgggaagtctccagaccttcttatcccgtgagaagatggactttcctcctctggctctccccttttactggacatgcaggcccaatgtaggaaggctggggcctgtcactcttcaacagccctcaggtgtcatcagctcaggaccaggattcattcagcatctacttactaagagctctgtaatgagaatgtgacaaataataactcgacgcatatcaaatgcatgcctcatcttacaaagtgctcttgcgattagtgttttgagggatcctagtgatgatgctgcaacgtagggaggccctaggtggagaagctgaggcccagggagctgaagtggcagcaccaggagtcacaccacagggtcttcccatatcctcctgctactttagtcctgccccatacacacgcactgagcaggaggcaggcttcctgcca

SEQ ID NO: 961 - DNA, 878 bp, Homo sapiens
atggtgagaggcctctccagaagtccctccttccccacccgccccatcccaggctgccatttcccactgaagggagcagtgagcctgccggtggccggaaagcagggacctatctttgggaggcgagagcagggtgcatcgtccagagtggtgccaggccctccaaagaaacctgatgaggacctctacttggaatgtgagccggatccagtcctggctttgactcagactctcagcttccaagtcctgatgccctcaggccctctgcccaggacatcagtggtgcccagggaacagcagatgctgcctctaaaggacagtgatctgctgactcagccttggtactcggggaactgtgaccgctatgctgttgagagtgccctgctccacttacaaaaggatggggcctataccgtgcgccccagctcagggcctcatggctcccagcccttcaccctggcagtgcttctccgaggccgggtcttcaacattcccatccggcggctggatggcggacgccactatgccctgggccgggagggcaggaaccgtgaggagctcttctcctccgtggcggccatggtccagcacttcatgtggcaccctctgccccttgtggacagacacagcggcagccgggaactcacctgcctgctcttccccaccaagccttgaggccacagcgaagaatgcaggtgtctgcccagttcactaggtcctggatgaaggaaccgtggtggcctagaccagtcaggggacagcacaggcactgctggaacagcaaaggatcctctcacatctacttgtgggcctagggcaccctgagagggactggcctaccttgcacaagttcacattcaataaacatttgttgaatg

SEQ ID NO: 962 - protein, 222 aa, Homo sapiens
MVRGLSRSPSFPWIPGCHFPLKGAVSLPVAGKQGPIFGRREQGASSRVVPGPPKKPDEDLYLECEPDPVLALTQTLSFQVLMPSGPLPRTSVVPREQQMLPLKDSDLLTQPWYSGNCDRYAVESALLHLQKDGAYTVRPSSGPHGSQPFTLAVLLRGRVFNIPIRRLDGGRHYALGREGRNREELFSSVAAMVQHFMWHPLPLVDRHSGSRELTCLLFPTKP

SEQ ID NO: 963 - DNA, 1412 bp, Homo sapiens
agaggggcccaacagactgggatcccttgcaagtcaggtcccccctgagtgactctgcacacctcctgcctcccagagcccagcactgctgagtcacaggggcctagctctcccatctgtcttggccagagtcaagggtgcaggggacaggggatgggcataggtggaagggccccttgtttccagactgcctacctcagtggccccgtggcagcattgggaatgcctgtgatgagtggttcctttgagttgaagcactggagggcgggtggtttattatactggggaaaggtgggcagggaggaggtgaggccagcttgtctgtccagactccccaggttggagagaagatgctcccagcccttccttcctgcctgccccagggacttggagacacaagcccctgcccaccttcctggcactgaggaggactccttgtacctggatcactctggccccctgggtccatcaaagccatcgccacccctgcctcagcccaccatggtgagaggcctctccagaagtccctccttccccacccgccccatcccaggctgccatttcccagtgaagcagggtgcatcgtccagagtgaaacctgatgaggacctctacttggaatgtgagccggatccagtcctggctttgactcagactctcagcttccaagtcctgatgccctcaggccctctgcccaggacatcagtggtgcccagggtgggacctggggcccggcctcttctgatcagacctcctgtatgccagggaacagcagatgctgcctctaaagaaggaaggaaatcgtctcttccctctgtagcccccactgggagtgcctcagctgctgaggacagtgatctgctgactcagccttggtactcggggaactgtgaccgctatgctgttgagagtgccctgctccacttacaaaaggatggggcctataccgtgcgccccagctcagggcctcatggctcccagcccttcaccctggcagtgcttctccgaggccgggtcttcaacattcccatccggcggctggatggcggacgccactatgccctgggccgggagggcaggaaccgtgaggagctcttctcctccgtggcggccatggtccagcacttcatgtggcaccctctgccccttgtggacagacacagcggcagccgggaactcacctgcctgctcttccccaccaagccttgaggccacagcgaagaatgcaggtgtctgcccagttcactaggtcctggatgaaggaaccgtggtggcctagaccagtcaggggacagcacaggcactgctggaacagcaaaggatcctctcacatctacttgtgggcctagggcaccctgagagggactggcctaccttgcacaagttcacattcaataaacatttgttgaatg

SEQ ID NO: 964 - protein, 349 aa, Homo sapiens
MGIGGRAPCFQTAYLSGPVAALGMPVMSGSFELKHWRAGGLLYWGKVGREEVRPACLSRLPRLERRCSQPFLPACPRDLETQAPAHLPGTEEDSLYLDHSGPLGPSKPSPPLPQPTMVRGLSRSPSFPWIPGCHFPVKQGASSRVKPDEDLYLECEPDPVLALTQTLSFQVLMPSGPLPRTSVVPRVGPGARPLLIRPPVCQGTADAASKEGRKSSLPSVAPTGSASAAEDSDLLTQPWYSGNCDRYAVESALLHLQKDGAYTVRPSSGPHGSQPFTLAVLLRGRVFNIPIRRLDGGRHYALGREGRNREELFSSVAAMVQHFMWHPLPLVDRHSGSRELTCLLFPTKP
